United States Patent Application Publication US 2026/0109938 A1 - sequence listing, part 2

SEQ ID NO: 1 - DNA, 3979104 bp, Escherichia coli (residues 1,989,553-3,979,104 of 3,979,104)
  source 1..3979104: mol_type = genomic DNA
gccatacccgcgggaatgaaattctctttattcctgcgctgtttattctgtttagtcttggcggcgcggtatttggtatgggagaagaggccgtcgcctttgccattatcatcgcaccgctaatggtccggctgggctatgacagtattaccaccgtcctggtgacctatattgccacgcaaatcggttttgccagtagctggatgaacccgttttgtgtggtcgttgctcaggggattgccggcgttccggtgctttctggctccgggttgcgcatcgtggtgtgggttatcgccactctgattggcctgatctttaccatggtgtacgccagtcgagtgaaaaagaatcctcttctgagtcgcgtgcatgagtccgaccgcttctttcgtgaaaagcaggctgatgttgaacaacgtccgtttacctttggtgactggctggtattgattgtcctgaccgccgtaatggtctgggtgatttggggcgtgatcgttaatgcctggtttattccagaaattgccagccagttcttcaccatgggtctggtgattggcatcatcggcgttgttttccgccttaacggcatgacggttaataccatggctagttcctttaccgaaggggcgcgaatgatgatcgcccctgccctgctggtgggtttcgccaaagggattttgctgctggtcggtaatggtgaagcgggtgatgccagcgtgttaaataccatcctcaacagcattgccaatgccattagcggtctggacaacgcggtcgcggcctggtttatgttgctcttccaggcggtatttaatttcttcgtgacgtccggttctggtcaggcggcgttaaccatgccgttactggcaccgcttggcgatctggtcggtgttaaccgtcaggttaccgtgctggcgttccagtttggtgatggcttcagtcacatcatttacccaaccagtgcgagcttaatggcaacgctcggtgtgtgcagggtggacttccgtaactggctgaaggtgggcgcgaccctacttggactgctgtttattatgtccagcgtcgtagtgatcggcgctcagttgatgggctaccactaaaaatgttaagagccgcaattgcggctcttttttcattctgccgtttcagtctctacggcttcatttttggcattgcgcttcatccacaacgctagcgctttcaggctgtctggagtgaactcatcgcagcgtgcggtgatttcttccggcgtcagccagcaaacttcactgacttcatcttcctgtagtgcgaagggaccgtgagagacgcagctgaacaatgcgccccagacacggcaatttttatcttcgaaatagaactgcccgtgctcggcaaaggggacaccggcaatgcccaactcttcttccgcttcgcgacgcgcggattccagcagttgctcatcggcctggactacaccgcctgcggtcgcatctaacatgccgggtaaaaagtcttttgtctcggtacgacgctggaccagaattttgcccatgccatcatgcacgacgatgtaagttgcacgatgacgcagacactgtgcccgcatttgttcccggctggcttgtgcaatgacttcgttctcttcattgacaatatccacccattcagtacttgccaaacgacgctgttccattatcaggaaaccttctttttctggcgctcttacggcgcattttgagttgtgggtaaattacggattaatcgcgacctgcgcaatgatactttgatcattgagtgcgattacactaagtacgtcattatccagcatgccataactcgccggattaccgcctttcggaatactcacgctgccggggttgaagtggaaaatctccccccgctgttctgccactggcagatgggtatgaccgtacaccagcacatcgttctggtttaaagcaggcagattttccgggccaaaaagatgaccatgcgtcaaaaacagacgttgtttttccagtaatacctgttgccacggcgcggttatcgggaaatgcagcagcatttgatccacttcgctgtcgcagttgccgcgcacagcgataaccttatgtgccacttcattaagccgttcagcgactttggctggcgcgtaaccctccggtaaagcattacgcgggccgtgattcaacacgtcgccaaggatcaccagccactgggcaccgctttgggcaaacaactccagaacacgttccgtcgccggtaagctcccatgaatgtcgcttgcaaacatcagtttcatcactcactcctcgtcgaaaaaacgtaagctatgatactggattctgtcgttgctatcagccagattgcttcgcgctaagtgcaataaaacgctggacagacgctcgctgccactggaatgttgcataatccaccaggcgttctggcacctcatcgccatgtagtaccaggcggttaatcattagcgccagatcagtatcagcaatgcaccattcaccaaataaattcggctgacccagtactaacaaatgttctgccatcgcgaacagtttctctgcactggcttttccctcggccgttagtggcgcttttttcgcccccgcaaagacaacatccgtcggacgctcttcgcggatgggcatcagatcgctgcgcagccaggcctgaatctgtcgtgcacgcgcacgattttctaaatcaagcggataaatacgttcccaggtcggtggcgcaaatcgatcttccagatactccgcaatggcagaagattcactcaactcaaaatcatcgatttgtaataacggcacacggcgtgtctgaccgtaaccttgccacgtcggctgcaaatgttcaccgctgtcgaggtcgatggtcttgatatgaaagctcaggcctttttcctgcaacgccacccaggcggataacacataaggggagaaaaagtgggcatcactccaaagcgtgatagcgggtttactcattatgtcctcggcaataaagggggctggctatcaaactatagagcctttttgtcactgtcacgtgacgaatactcacgtaagtcgccgcgctttctatacttgtggtgttcagatgattaaacaaccggagctgcaatgatcgatctctatttcgccccgacacccaatggtcacaaaattacgctgtttctcgaagaagcagagctggattatcgcttgattaaggtagacctggggaaaggcggtcagtttcgtccggaatttttgcgcattagccccaacaacaaaattccggcaattgttgatcattctcctgccgatggcggcgaaccgctaagcctctttgagtctggtgccattttgttgtatctggctgagaaaacaggactctttttgagtcatgaaacgcgtgagcgcgccgccacattacagtggttattctggcaggtaggcggactggggccgatgcttgggcaaaatcatcattttaatcacgcagccccccaaaccattccttacgctattgaacgttatcaggttgaaactcagcgtctttaccatgtactgaacaagcggctggaaaacagcccctggctgggaggcgagaactacagcattgcggatattgcctgctggccgtgggttaatgcctggactcgccagcgaattgacctagcaatgtatccggcagtcaagaactggcatgagcggatccgtagccgccctgccaccgggcaggcactgctaaaagcacaactcggtgatgagcgtagcgatagttaacagaaacaggttctcgtgtattatttcatcctaagtaaaacaacggagaacctgcaatggcacaacctgccgctattattcgtataaagaaccttcgtttgcgtacgtttatcggaattaaggaagaagaaattaacaaccgtcaggatattgttatcaatgtgacgatccactaccccgccgataaagcgcgcactagcgaagatatcaacgatgcgctgaattatcgcaccgtaacgaaaaacattattcagcatgtagagaataaccgtttctctttgctggaaaaattaactcaggatgtgctcgatatcgcacgtgaacatcactgggtgacgtatgctgaagtggagatcgataaactgcacgcgctgcgctacgccgatagcgtatccatgaccttaagctggcagcgttaatcgccatatcgggaggctgcatgaacatagtgatcaccggagggacaggattaattggtcgccatttgattccgcgtttgctggagctgggccatcaaattacggtagtgacgcgtaacccgcagaaagccagttccgttctcggccctcgggtgacactatggcaagggcttgccgatcaaagcaacctcaacggcgttgatgcggtaatcaacctggccggagaaccgattgctgataaacgctggactcacgagcaaaaagagcgtctctgccaaagccgctggaatatcacgcaaaaactggtcgatttgattaatgccagcgacacgccaccgagcgtactcatttccggcagcgcaacgggctattatggtgacttaggtgaagtggtggttaccgaagaggaaccgccgcataacgaatttacccataaactctgcgctcgctgggaagaaattgcctgccgggcgcaaagtgacaaaacgcgagtgtgcctgctgcgtaccggtgtagtgctggcaccggatggcggtattctcggtaaaatgctgccgccgtttcgtcttggcctgggcgggccgattggctctggtcggcagtatctggcctggattcatattgatgatatggtcaacggtattctctggctgctggataacgagctgcgcgggccatttaatatggttagcccctacccggtacgcaatgaacaatttgcccatgcgctcggtcatgcgctgcatcgcccggccattttgcgcgtccccgcgaccgccattcgactgttaatgggcgaatctagtgtactggtattaggtggacaacgcgcgctgcctaaacggctggaagaagcgggttttgcgtttcgctggtacgatttagaagaggcgctggcggatgtcgttcgctgatgtggtttacagcaaacatccgccagttaactcccggtgttacaggattagtggctttgcgcgataagatcgtctggactaagtcgggtcaccatcataactaactctctgtctaaacctctatccagcatctcctgagcaatacgcagggcttcttcgtgtttgccctgcattgcgccttcttcacgtaatctgtcagcaatggtcatcagtttctccttttcttgtggtgcgcgttccgctatctcaccaataaatgcacgaaaacgctgggcatcccctgtttgtaatacgtaattaaacagggcttttagctgtctgtcattagtgttccctgtaactagcaggctaacaatttggtcgactaatcccaacagatcgcgctgacgaatatgtttctgaattaactccaacagcgccattttgcggtgttgcataatctcgtcatccggcaccacggtaatatccaccaacggaaaagcgctactatatattttgcgggctatagcaggctcggcaaattcatcaagccagcagagactataaggataaggacttctgcaaccatgataaaacagcatcgggagcaccaatggaagctctttatagcccgcatcaagatggttttgcattgccgcaatggaataacgcatcatgcgaaaagccattaattcttccggcttactttggtgctctatcactacataaatataacccactccctcctgcgttttcacagaccacaagaggtcggaataatattgccgcaggtcttcatcaataaaactgtttggttccagtttaagcgtcgttaaatcacacagtttgcgcagcggcgcgggaagatgaatatcaataaaatcccgcgcggtgtctggatggcgtaaaaaagatttaaataccgcatcatgcggcgtggaagttgtgcttattgtcatggcgttccgtcacccctcaaatttaagatgacgcgacaataaccacgattaacacccaatgcagcaggcagtttttatctttggacagcgaattcagaagtatttttagcggactgtaacttttacatttcagcggaagctgactcgcaaattccccatgaaaatactccggcagcgttagccaccggagaggaaattatttcaggcttcccttaaggaaccgttgcagacgagggctttgcgggttgccaaataactgctccggcgcgccctcttcttctattttcccctgatggaggaaaatgacatgagtagaaacatggcgagcaaagcccatttcgtgagtcactaccaccatggttttcccctcttctgccagttgctgcataatacgcaacacttcgcctaccagttcaggatcgagcgcgctggtaggttcatcaaacagtaaaacttccggttccatcgccagcgcccgcgcgatagaaacacgctgttgctgaccgccggaaagatgcaccggatatttcccctgcgcacgttcgtctatcccgacttttgccagatacttcaccgcccgctcgcgcgcttcctgcttgctcaggcccaacacctgaatcggcgcttccatgacgttttccagcaccgtcatatggctccagagattgaagtgctggaataccatcgtcaggcgtgtgcgcagtaagcgcagttgatttttatcggcgactttgagttgaccgtctttgtcgcgcaccagattgatcgtctggccattgaccacgatgctcccttcactcggtttttcgaggaagttaatgcagcgcagaaaggtacttttcccgcttccgctgcttccgatgatgcttattacatctccggcattcgcttgcagacttacccctttcagcacttcatgttcgccgtagcgtttgtgcaaatcgataacgtttaatttattctcggacatcgtattctcagtgcgtactagaaggtttcacatgctgcaaccagcgtttttccgctctgcgaaagaggctgatcaggacataagagatgattaaatagagcaccgcggcaatgccgaaggcggtaaaaggttgatacgtggcggcgttaatatcgcgggctattttcagcagatccggcaccgtggcagtaaatgccaacgcagtagagtgcagcatcaggatcacttcgttgctgtatgccggtaacgcaatacgcagcgcagaaggcaaaataatgcagcgatacattttaaaagtgctgaagccataggctctggcggcttcaatttccccatgcggaacgctacggattgccccagcaaaaatctcggtagtgtaagcgcaggtgttaagcgtcagcgccagcacggtacagttcaggccactgcggaagaaagcgttaaggaattcggttcccttaacaatctcaagcgtgtacatgccggaatagaacaccagcaactgaacatacagcggcgtaccgcgaaaaatataggtaaataaccagattggaaactggatgtatttattactggagacacgaccaatcgccagaaacagcgccaggactccgcctatcactacgctcaaaataagcagccacagagtgatcgccacaccagtaaagcgataaccgtcggtccacagcagcggtttccagtattcatgtaagatttcgatcacaggtcagccctcttcacacccacggagtagcggcgctcaaggaacagcagcacaccattggaaacagtggtgaaaaccaggtaaatcacgccacagacgatggcgaaatagaacggttcccaggtacttttgcctgccagttgggtggctttgaccacatcttccaggccgagtaagctaaccagtgcggtagatttgaggatcacctgccagttgttgccaatgcctggcagggcgtaacgcatcatgctcggaaacatgatccgccgaaacacttgcccacgagtaaaaccgaacgccgtcgccgcctctatatgtcctttcggcactgccataaaagcaccacggaacgtttcggtaaaataagcaccgtagataaaaccgagagtgataataccagcgaccatcggatcgatatcaatctgcccgacgcccatcgcctccgtcaccgtgtttagcgcaatctgcaaaccgtagaaaatcagcagcatcaacactaagtccggcacgccacgaatcagcgtggtgtacccttcgaaaatcagcccgctaagccgattttggctgagcttaccgccagcgccaattaaaccgatgattacagcgagcactacagagctgatagccagctccagcgtgacgagcgcaccctgtaaaataacaccactaaacccatacaacatgctgcctgtcctgtcgtgtgtggtgaattaccgcctcttgtctccctccggttacccgaagggagcgggctttctttcaccgatggcgattagccaccataaacatcaaaatcgaagtactttttcgctaatttctcgtaagtaccgtcagcgcgcatttcggcaaaggctttgttcagtgcttcgcgcagttcgttatcttctttacgcaggcccatgccggtccctacgccaaacagtttttcatctttaacagacgggccaccgaatttgtaatctttaccgacaggttgtttgaggaaaccttcgctggcagcgacctcatcctggaacgcggcatcaatacgtccggcagtcaggtcagaataaatgttgtcctgcccctgatagctgacgatttcaatgccttttggtgcccaatgttcattaccgaacgtctcctgggtggtgccctgcaatacgcctacccgtttgcctttcaggctctcgactgtcggctgaatgtcagaatttttcgccaccaccaaacgagaatcggcagcgtacagtttgtcggtgaaggctatttcttgctgacgtttttccgtaatggaaaggctactcatgatggcgtcaatcttcttcgcttttaaggacgggattaacgcatccagcggattttcgacaaacgtacattgcgtattgatgcgtttgcataattcctttgccagatcgatatcgaagccaaccagttcgccttgactatttttactttcaaatggcgcataggtcgggtcggtaccgatgcggatgttttgcggaatcgcagcaaacgccgcagttgcgctggagaaggccagaaccagagagaggcttagcaccagttttttcataatgtcctcaactgacagtctttttatagggaatatttacaggtttgttacacttatcgtgccataaaattgaccatcaaggcaaaatatcccgccccgttagacgtattatttttcattaaaaatgcttaagtatgcatttcaatgcaccacgatagtgcaacaaacctggcgtgcaccatgatgatcattccatcaggtacagcttcccagcgacgtatcagtcaccgtagacattaaagtcgaaatactttttcgccatcttgtcgtaggtgccgtcctgacgcagctcgccaagcgccttattgaaggcagccgtcagttcagcatcatctttacgtagccctacaccggtgccatcaccgaagtattttttgtcttttacactactgccagcaaaggcgaaatctttaccagcaggttgcttgaggaatccttcgctggcagcaacttcatcttgtaacgcagcatccagacgtcctgcagccagatcggaatagaccaaatcctggttggcataggccaccacatccacgcctttactacgccaggtctcgttagcgtaagcttcctgggtacttccctgcagcacaccaacatgtttacctttcagactatccagcgttggctgaatcggactacctttggccgcaatcaaacgagaatctgcggcgtacagcttgtcggagaaggcaatctcctgctgacgtttatcggtaatggaaaggctgctaataatagcgtcgatttttttcgctttcagactggggatcagcgcgtcaaagtcactggcaacccaggtacatttcacctgcatccgtttgcacatctcgttaccgagatcgatatcaaagccaacaaaatcacctttagcatctttgctactgaacggtgcgtaggtggtatcggttccgatacgtaccgtctccggtagcgccgcatagctggaagccgctgtggagagaccgactaacaaagacagagcgagaatgctcttcttcatacataaccctcaagtgaaaatggcttttttatgttgtgtattgtgttgtgtgtttgcaggctctttcatgcaggtcttatgccatcttgacgacaacagtaacattcaacgttaaatatgttaataagacgttgcattattgtcctgaagttgaagatagcaggtatagcggttgaatcgcagcgtttcgattgaatggcagaaacaaaatgtcgaggatttgatcgcggttgcaaaattgccctgaaacagggcaacagcggagttatgcgccctgccagcgggcaaagagatcttcaggaagggttatcgcaaactggtcaagaacacgattaaccgtctgatttatcacatcatcaagggattgcgggcgatgataaaacgccggaacgggaggcataatcaccgcaccgatttctgccgcctgagtcattaaacgcagatggcctaagtgcaatggtgtttcacgcacgcagagcaccaacgggcgacgctctttcagcaccacatctgccgcacgggtcagtaagccatcagtatagctatggacaatgccggaaagggttttgatactacagggtaaaatcaccatccccagcgtctggaaagaaccggaagagatgctggcggcaatatcgcgcgcatcgtgcgtgacatcggctaatgcctgcacttcgcgcagagaaaaatccgtttcgagggataaggtctggcgcgctgcctggctcatcaccagatgcgtttcgatatctgtgacatcgcgcagaacctgtaataagcgcacgccataaatcgcgccgctggcaccgctgatgcctacaatgagtcgtttcataaatagttgccctgtcagacttgcaggcagactttgcaggatttcggcgggagttgcaagtcagggtgccagaccggcaccctcagcgaaggcatcatccttcgttatgcatttcgagattttccacttcgttctgacgttgcactgctttggcgtcatcattacgtaacgtatcgaggaaatcgaggtagccctgatcaacatctttggtgacgtagacgccgttgaacacgctgcattcaaactgctggatatccggattttcagcgcgaacggcgtcgatcagatcgttcagatcctggaaaatcaacccgtcagcaccgatgatctggcgaatttcatcaacttcgcgaccgtgagcgatcagttccgtggcgctcggcatatcaataccataaacgttcgggaagcgaatttccggtgccgcagaagcgaggtacactttcttcgctccggcttcgcgtgccatctcgataatctgctcagaagtggtgccacggacgatggagtcgtcgaccagcaggacgtttttatcgcggaactcggcgcggttggcattcagtttacggcgcacggacttacgacgcagctgctggcccggcatgataaaggtgcggccaacatagcggtttttaacgaagccctggcggtacggtttgcccagaatacgagcaatttccagcgcgatatcacagctggtttctgggatcgggatcaccacgtcgatatccagatcttcccattcgcgggcaattttctcgcccagtttcgtgcccatattcacacgcgcgctgtaaacggaaattttgtcgataaagctgtccgggcgggcaaagtatacatactcaaacaggcacggattgctgaccggattgtcagcacattgacgggtaaacaactgcccttcttcagtgatgtaaatcgcttcgcccggcgcgacgtcacgcaggaaatcaaagcccagcgtatcgagcgctacgctttcggaagcgaccatatattctgtacggttctcgtcaatatcacgttttcccagtaccagcggacgaatcccgtttggatcgcggaaagcaaccataccgtggccgataatcatcgccacacaggcatacgcgccgcggattaagcggtttgtggcagcaatggcagcgaaaatattgtcggcttccagcgggtagtggcggaagttgtccagctcgctggcgaagatattaagcagaatttcgctgtcggaagtggtgttgatgtggcggcgtttttcttcaaacagttttttacgcaactcgtgagcgttggtcagattgccgttgtgggcaagcgtaatgccatacggggagttaacgtaaaacggctgcgcttcagaggcgctggagctgccagccgtggggtaacgcacatgaccaatgcccatattgccctgcaaacgctgcatatggcgagcttcaaatacatcgctcaccagcccgttcgctttacgcaaacggaagcagttattggcatctatggtgatgatgccggcggcatcctgaccgcgatgctgaagcaccgttaaggcatcataaatgctctggttaaccggcataacaccggcgataccgacaataccgcacatacgtctttttcctcgttaagccacatctcagagcacttacgctctgggcaagaaactactgctgctttgcagataatcaaaaaaacatctgatgataaaactgaattgcgggatcagctgacttttgctccagtcttcgcttttgctcaccccggtaaaggagtcgagaaagaagagaatggcagcaacaatcaacacaccgcgcaacgcaccgaaacagacgcccagcacccgatcggtgccactcaaccccgttttctccaccaactggcctatcacgaagttcacgatagcaccaacgatcagggtagcgataaacagtaccgcgatggcaatcccatttcgaaccagttcgtcttcaaagcccgtaaaccagacactcaggtaagtgtagtaatgactggcaacaaagaaagcacaaccccatgtcaccaggcttaacgcttcacgaacaaagccgcggatcaggctaaccagagaggaaaaagcaatcaccgcgattatggcgtaatcaatccagaccatatgtgtcccacgattttacgccctgtcatcctgttcggggcgcattctaacagaaaaagaaaacgtttgcgtagggatttccttcccgcgcatcaataaaaatggcgctgaaaaaatattcaacgccatcgactttttatgcctttgcggcatcgggcaatgcgtgtcggatgcggcgtaaacgccttatccgacctacggttctacccctgcgtaggcctgataagacgcgccagcgtcgcatcaggcaagaccgtattaattcggcgtatagcccattaccacgccacttaagccagaaagttgcttcaactcacccaggctacctttcagcttatctttgctggcatccggcccaaccagaatacgggtaattttaccctgcactggcgtggatgggctcgtataaacccgataaccggcaccgcgcagcttaccgacaatctcattcactttatcggcatttttcagcgcacccagttgcacaacataggctttacccgtcggtgcagctttttcttccacgaccggcttcggttctggcttcggcgcaggtggtgcttcaacctttggtttaggcggctccaccggtttcggcttcggtggggcgaccggtgcaggttccggttcaaactcggtgttattggctgcaatagtggccggatcgaggctcggtgctgcggcatcacctgcccgcacctcttccgctgcgccttccggcggctgcgtcggtaacgcctgggtggcggctggcatcatatcaggctcatcacgatcgcccgctttcggcaccagcgggatagccgcgaactcatcctgataatgttttttctgcccgtccagcagccctggaagtacaatcacccccagcgccaccagcacgatcgtgcccactaaccgattctgaaacttacttgccaccgcttctcctcgcgtcaatcacttccatgacatgtgcgaccgtgtggaaagaaccacacaccagcacggtgtcttccgctttagcgtccgccattgcggcatcccatgcctgcgcaacgctatcaaaacttttgccgttacccaaatgctcaagcagttgttctgccgtggcaccgcgcggcccttccagtggcgcacaataccagtcatcaaccacgcttttcaaccaggccagagttccggcaatatctttatcatgtagcataccgataaccgccagcacgcgcccgtttttcggtagcgctttcatacgcccggtgagatattccgccgcatgtggattatgcgcgacatcaaaaataacgcgtgggctctcgctcacaatctggaaacgtcccggcaaaattgcgctggcaatcccgtcgcgaatggcattttcactgacttccagcccgctggcacgcagtgccgccagcgctgttgcggcattcggttgcgggacaagcggcaacggcagattttccagcgtgccgtgagcatcgctaaacgcccagtcatgatcggtgacggaatagttccactcaacgccccgacgttgtaacagtgcacctttttcctgcgccacatcagcaatggtagaaggcatttccggctcaccgacaattgccggtttttcgctgcggaagatgcctgctttctcgcgaccaatactttcgcgatctggacccagccagtcggtatgatccagcgcaatactggttactaccgcgacatcggcgtcgacaatattggttgcgtccagacgaccgcccagccctacttccagaatcaccacgtcaagttgtgcctgcttgaacagccacaacgcgctcagcgtaccgtactcgaaataggtcagggaaatatcaccgcgtgcgctttcaatctccgcaaaagaggcggtgtgggcgctttccggcaattcctggccctgcacacgtacgcgctcggtataacgcaccagatgagggctactgtagacgcccactttgtaccctgccgccatcagaatgctctccagcgtacggcaggtggtgcctttgccattcgtacccgcaacggtaaacacaaatggcgctggtttcaggacgccaagacgcgccgcgaccaggctcacgcgctcaaggccgagatcgatagttttactgtgcaggttttccagataagaaagccagctagccagagggctcgcggcttgaggagtgcgtttgataatcatggtatccgctgattcgttacggtgagaatagcaaaagggcagagccagtggccctgcccttatcagttatcaggcctcaggttcctgatccggtaccgggggtaccactacgccttcacgcggcgcttcaggattcggcgctggcagattcatcaacttcgccagaatgctcgccagtttcaggcgcatttccggacgacggacgatcatgtcgatcgcgcctttctcgatcaggaattcactgcgctggaatccaggcggcagtttttcgcgaacggtctgttcgataacacgcggaccggcaaagccgattaacgctttcggttcagcgatgttgagatcgcccagcatggcgaaacttgcagaaacaccgcccatcgtcgggtcggtcagcacggagatgtacggcaagccgcgctcctgcatttttgccagtgccgcagaggttttcgccatctgcatcaggctcatcagtgcttcctgcatacgtgcgccaccagaggcggagaagcagatcagcgggcagttatcttccagcgcctgctcaacggcacgcacgaaacgtgcacccacaacagaccccatactaccgcccataaaggcgaactcgaatgccgcagcgacaaccggcattccatacagagtgcctttcatcaccaccagcgcatctttttcgccggtttctttctgcgcagatgccagacggtctttatacttcttggagtcacgaaacttcagcacatctttcggctcaagctcgctacccagctccacaaggcttccttcatctaacaggctatgcaggcgattacgcgctgtcatacgcatgtgatggtcacacttcggacagacctcaagattacgttccagctcagcgcggtataaaacctgaccgcagctatcacacttagtccacaccccttcaggaatgctcgccttgcgggtgggagtaatgttgcttttaattcgttcaatccagctcattagggacctttctgtctgaacctggttcgatgccagttttatctttggggacgcataatgccatttttgcccccaacagaccatgaatgttgcacattaaaacataacagcccgaaactttggataaaaaagtggtcgaaccgcggagttactttttattttgcggcgcgtgccgcagcgcgtttgtgacggattatttcgatgacgcccggcaaaatagaaaccacaataatcccgacgatcagcagcttaaggttatcctgaaccatcgggattgtaccgaagaaatagcctgcgtaggtaaaaagcagtacccacaacagtgcgccgatcacgttataagcggcgaaatgacggtagctcatgtggcccattcccgcaacaaacggggcgaacgttctgacgatcggcacaaaacgggcgagaataatcgttttgccgccatgtttctcataaaactgatgggttttgtcgagataactgcgacggaaaattttgctattgggattactgaacaacttttcaccgaacaaccgcccgatagtgtaattgaccgcgtcacccacaatcgcggcgatcagcatcagcaccaccatcatatggacgttgagatcgttggtttccagacttgccaacgctccggcaacaaacagcaaactatcacccggtaaaaacggcgttaccaccagaccggtttcacagaacaaaattaagaacaaaatggcataaacccagacgccgtactccgcgaccagctctgccagatgcacgtcaatgtgcaggataaaatcgatgaggaaataaatcaggtccatatttgcctatgccttgtactcgtcatctttcaggctgtaactacgttggctacagcctgaaatgttccgagcattattctcgttagtccgccagaaatagcgggcccattggcggttttggaagatcataccggtcagggtaatccaccgcgaccagatacagcccttccgcttttgccgttgctgccgccagcgttctgtcctttgccgccagcaactctgctatccagctctccggctggttgtgggcaccgacttccatcaggctgccgacaatattcctgaccatatgatgtacaaaagcattcgctttaatatctaccaccacataaggaccgtgacgcgtgacattaatatgcataacgttgcgccacggggttcgggactggcactgcaccgcacggaagctggtgaaatcattctcgcccagcaagcattgcgcagcccgatgcatccgttcagcgtccagcggttcgtaaaaatgggttacccctttactcagtaccgccgggcgcagccgatgattgtagatgatgtagcgataacggcgagccgtggcgctaaatcgggcatgaaaatcatcaggtacagttttaacccaacgcacagcgatgtcaccaggtaaattcgcatttacgcccaaggtccacgccgcgtctttgcgcagcgcggttgtttcgaaatgcacaacctgcccggtaccgtgtacccctgcgtcagtacgcccggcgcagaagacggtgatgggttcgttcgccacctgggagagcgccttttccagcttctcctgcacactgcggacttcgttctgccgttgccagccgtaatacttactgccgtcgtactcaatgcccagcgcaattttataaactggcggttgttgctggtcggacattagtacagatactcctgcaccagtttctcggcgatttttactgccatcagcgcgccgccaaagcgaacgttatcggccacgctccagaactggacttgctccggcataccgtagtcattacgcacgcagccaacagaaagatgcggcgtaccgctagcatcacctacctgagttgggaattcgttctcttcagagagcacaatatcttcgccttgaacaaacgcatcacgcgcttcttctgctgccagtggacgcagagcttcaaagttgaccatctgggcatgaccgtagaataccggtgcctggacgacgctagcgctaatcatcagcccttcgtcctgcaggattttgcgtacttcgtcaacgatacgacgttcttcacgcacgctaccttcgctatccggcagtaacggcagcatgttgaacgccagctgacgcccgaagaaatcttcttcgtcaatcggaatgccgttgagcaatttcgcactctgccccgctaacgcatcgaccgcttttttgccctgggcggaggcactaatcaggctggtaacgctgatacgacttaaaccgccctgatcgattaacggtttcagtgccgccagcagctggctggtcagactgtctggtacggcgatgacattccggttccggtaatctgtcagtacaaacgggtttacttccggcaccaccagcggtacgtcgggttcgagagcaaacaatccactgctgtcgatcaccaggcaaccactgttggtcgcttcttcaacccaggcagcggtagcttctttgcctgcgacaaaaaatgccagctgcgcctgcgtccagtcgaattcagcggcatcctgcacggtgattgtcttaccaccaaagcgcagttgttcgcctgcgctttcgttacgtgccagtgcataaatttccccaaccgggaactgacgttcagccagcgtttcaagcagggcttcgcccacagcgccagttgcgcccaggacggcaatgttccagccttcagacatggtggtttactccagaaatagcaaagctccctgccaatgttacagcagagagcatgaagaagagattaacgtgccggatgatgaacggcgttaaaacccagtttacacagcaaacttgccgcactggcgtcatcacaaattacatacagagaactccattcacggcgctcaagatagtttttgcgcagtttatcgaactcacccggtatcccggcgactttacgcagcggtgcgtcatcgcggcgcacatcatacaccaaatgcaccagccttttcagcgtcggttgatcgagcgggccatgcagcgtaatgcgaccaaactctggcgcaggcagtaatgtatccagcgcaacgtgctgttcatgcccaataaacttgctataagcttcaaacacttgcgtagtaccgcgtgctttaccttccagggtatagcctgcgatatggctcgtgccgatatccacttttttcagcagctcgacgttgagttccggttcgccttcccagacatccagcactacgcttaacttctggccttcattcaggcaggtcagcaacgcagtattatcgacgactgcgccacggcaggcgttaatcagaatcgctccgggcttcaggctacggatcagtttttcatccgccagatgtagcgttttgtacggaccatctttaaagagtggcgtatggaaagtcagaatatccgcgcgctggactaactcatccaggctgcggaaatcaccctcatccccacggtcggcgcgaggcggatcgcaaagtaaggttttaatccctaacgcttccagtcgcgcctgcaatcgacgtccaacgttaccaacgcccacgatccccaccgtacggtcgtacagactaaatccatcgcgttcggcaagcatcagcagggaggagaaaacatattccaccaccgcaatcgcattacagccaggtgcagcggaaaaaccaattcccgcctgcttcaaccatgcttcatcgacatggtcggtccccgcagtggcagtgccaacaaatttaatgggttttcctgccagcaaagattcattcactttcgtgacgctacgcaccatcagcgcatccgcgtctgccagttgagcgacggggattggacgcccgggaaccgcggtcacctcacccaaacggctaaataagtcgcgggcataaggcatattttcatcaacaaggattttcacgtttgtgttacctgtatgagacgagagttaaccggacaagtgtgccataatctcgcggccaggcatacttgcgaagatttcaggtataaggatacgtaatgatacaacctatttccggccctcctcctgggcaaccaccaggtcagggagataatctgccgtctggcacgggcaatcagcctttatccagtcagcaacgtactagcctggaaagcttaatgacgaaagtgaccagtctgacgcaacagcaaagagcagaactgtgggcgggtatcaggcacgatattggtctgagcggagatagtccgctgcttagccgtcacttccctgccgctgagcataatctggcgcaacgtctgctggccgcgcaaaaaagccattctgcccgccagcttttagcgcaattaggggagtatttacgtctggggaataatcgtcaggcggtcacggattatatccgtcataactttggtcagacgccgctgaatcagctcagtccggagcaattaaaaaccattctcaccctgttgcaggaagggaagatggttattccgcaaccacagcagcgcgaggcgaccgaccgtcctttattaccggcggagcacaatgcgctaaaacagctggtgaccaaacttgcggcggcaacgggggaacccagcaaacagatctggcaaagcatgctggaactttccggggtgaaagatggcgagttaattccagcgaaactgtttaaccatctggtgacctggctacaggcgcgtcagacgctaagccagcaaaatacgccgacgctggaaagtctacagatgacgctaaaacaacctttagatgccagtgaactggcggcgttaagcgcatatatccagcaaaaatatggtctttctgcgcaaagtagcctttcttctgcccaggccgaggatattcttaatcagctttatcaacggcgggttaaagggattgatccgcgtgttatgcaaccgctgcttaatccttttccaccgatgatggacacgttgcaaaatatggcaacgcgtcccgcgctgtggatactgttagtcgcgattatcctgatgctggtctggctggttcgttaaccccgacgaaaactcagtatcgtgacaataatacccagcaccgcagagatcgccccggcaagaaatacgctagagtaaccaaacgtggtcgccagcattcccgccagcggcccggagacgccgagggcgatatcctgaaacgcggcgtaaccgcccagtgcggtgccgcgaacttgactggggacgcgtttaaccacctccacgcccagcgcaggaaagataaggctacatccggctccggttaacgccgcgcccgctaatgcgacccatgcacctggggcttgccagagcagcaacaagcccaccgtttctacaagcagagagacaatcgccactttcacgccgccaaaacggtccggcatccagccaaacatgacgcgcatcacgacaaatgcgccgccaaacgcggtaagagtaaagcccgccatcgcccatcctttgctggcaaagtagaggctaacgaaagtcccgataacagcaaaaccaacgccttgtagtgccagacctaaccctggtttccagataagcccgacaacgctccacaggcttggacgttctcccgccagggccggtactttgcgcactgtgccgttacaggcccacgccagtacgggtaataccattgtggtgatcgccagtgcggcaaaaccgtaatggctatgaatcaacaggccaagcggagcaccaacagcgagggcaccgtaaatcgccattccgttccaactcatcactttgccagagtgttttggccctacgatgcctagtccccaggtcagagcgcctgtcagtaactggctttcaccaaagccaagaatcaaacgcccgacgaccaacagagcaaatttgaacggtgcggagacaggcaaaatcgccgccagcagcaacgcgccgccagccagaccacaagctaacattccctgaagcgcgctacgttttgcaccatattgatcggccagtcgcccggcgtaaccacgcgtcagcaccgtagccagaaactgaatcccgacggcaatgccgaccatggtattgccatagcccagttcatgatgaacaaacagcgggataaccggcaacggcaaccctacggtcatgtaggtgagaaaaaccgcaaaagcgatgcggaagaggctaaaattggcagaagatcgtgtttcggtttggcttacagcagtcatgcattactccagaatgcagcgcaaggcgaggagtatccccgtctcatctctctggtttcagggttacggtgcgttggcaggatttaacgcgtacgtcttttcagaaggaaatcgacaaagcgggaagtttgcctggaactggcggcgattgtcaatgatgtgaaaaagggaaccatcaggttcccttttgcgttagtgccggaggccgcattggcgcgtaacgtcggatgcgacgctggcgcgtctactccgacctactgcgaattaatctttcagcttgcgcattaccagcgtggcgttggtgccgccgaagccgaagctgttagacataacggtggtcagttcgcgatcggtcgtttcggtcacgatgttcagacccgcagcctgctcgtccagctcttcaatgttgatgctcggggcgataaagccgtgttccagcatcagcagagagtagatagcttcctgtacgccagcagcgcccagagagtgaccggtcatggctttggttgcagaaatcgccgggctcttatcgccgaacacttcacggatagctgccagctctttcacgtcgccaaccggagtgctagtaccgtgggagttcaggtaatcgattggggtatcaacgccatgcatcgccatcttcatgcagcgtactgcgccttcgccagacggagcaaccatgtctgcaccatcagaggttgcgccgtagccaacgatttcagcatagatgtgagcaccacgcgccagcgcgtgttccagctcttcaaccactaccataccgccgccgccagcgataacgaaaccgtcacggtgagcgtcgtaagtacgggaggctttttccggggtgtcgttgtatttagtagacagcgcacccattgcgtcgaattcgcaagccatttcccagcacagctcttcgccgccgccagcaaacacgatgtcctgtttgcccagttggatctgctctactgcgttaccgatacagtgtgcggaagtcgcacacgcggagctgatggagtagttaacgccatgaattttaaacggggtggcgaggcaggcagaaacgccggatgccatcgctttggtgaccacatacgggccaaccgctttcaggccgcgcgggccgcgcattgcgtcagcgccgaacacctggaaacgcggggagccgccgccggaacctgcaatcaggccaacgcgcgggttattctggtaagcttccggagagaggcccgcatcagcgattgcctgctccatagaaaggaatgcataaatggatgcgtcgctcataaagcgcacaactttgcggtcaatgaggccagtggtatccagttttacgttgccccagacgtggctacgcatgccggaatccttcagctcctgagagaaagtgatcccactacgtccttcacgcagagatgccaggacttcctgctggttattaccgatgctggaaacaatgcccaggccagtaatcactgcacgtttcattcaatacctctgtaagtcgcacatagagtaagtttcgaatgcacaatagcgtacacttgtacgccgaacaagtccgatcagccatttaatagagaaatttgcgcagccttacacacatcgctaagatcgagccaccgcctgtaagacgagtaacttacgtgaaacactactccatacaacctgccaacctcgaatttaatgctgagggtacacctgtttcccgagattttgacgatgtctatttttccaacgataacgggctggaagagacgcgttatgtttttctgggaggcaaccaattagaggtacgctttcctgagcatccacatcctctgtttgtggtagcagagagcggcttcggcaccggattaaacttcctgacgctatggcaggcatttgatcagtttcgcgaagcgcatccgcaagcgcaattacaacgcttacatttcattagttttgagaaatttcccctcacccgtgcggatttagccttagcgcatcaacactggccggaactggctccgtgggcagaacaacttcaggcgcagtggccaatgcccttgcccggttgccatcgtttattgctcgatgaaggccgcgtgacgctggatttatggtttggcgatattaacgaactgaccagccaactggacgatagcctaaatcaaaaagtagatgcctggtttctggacggctttgcgccagcgaaaaacccggatatgtggacgcaaaatctgtttaacgccatggcaaggttggcgcgtccgggcggcacgctggcgacatttacgtctgccggttttgtccgccgcggtttgcaggacgccggattcacgatgcaaaaacgtaagggctttgggcgcaaacgggaaatgctttgcggggtgatggaacagacattaccgctcccctgctccgcgccgtggtttaaccgcacgggcagcagcaaacgggaagcggcgattatcggcggtggtattgccagcgcgttgttgagcctggcgctattacggcgcggctggcaggtaacgctttattgcgcggatgaggcccccgcactgggtgcttccggcaatcgccagggggcgctgtatccgttattaagcaaacacgatgaggcgctaaaccgctttttctctaatgcgtttacttttgctcgtcggttttacgaccaattacccgttaaatttgatcatgactggtgcggcgtcacgcagttaggctgggatgagaaaagccagcataaaatcgcacagatgttgagtatggatttacccgcagaactggctgtagccgttgaggcaaatgcggttgaacaaattacgggcgttgcgacaaattgcagcggcattacttatccgcaaggtggttggctgtgcccagcagaactgacccgtaatgtgctggaactggcgcaacagcagggtttgcagatttattatcaatatcagttacagaatttatcccgtaaggatgactgttggttgttgaattttgcaggagatcagcaagcaacacacagcgtagtggtactggcgaacgggcatcaaatcagccgattcagccaaacgagcactctcccggtgtatagcgttgccgggcaggtcagccatattccgacaacgccggaattggcagagctgaagcaggtgctgtgctatgacggttatctcacgccacaaaatccggcgaatcaacatcattgtattggtgccagttatcatcgcggcagcgaagatacggcgtacagtgaggacgatcagcagcagaatcgccagcggttgattgattgtttcccgcaggcacagtgggcaaaagaggttgatgtcagtgataaagaggcgcgctgcggtgtgcgttgtgccacccgcgatcatctgccaatggtaggcaatgttcccgattatgaggcaacactcgtggaatatgcgagcttggcggagcagaaagatgaggcggtaagcgcgccggtttttgacgatctctttatgtttgcggctttaggttctcgcggtttgtgttctgccccgctgtgtgccgagattctggcggcgcagatgagcgacgaaccgattccgatggatgccagtacgctggcggcgttaaacccgaatcggttatgggtgcggaaattgttgaagggtaaagcggttaaggcggggtaatctgctctcgcagtgtttgccggatgcggcgtgaacgccttatccgacctacgtgtgacgtgtaggcctgataagacgcgataagcgtcgcatcaggcatgctgctccagacgccgcaacttactgctgactcgcctgctgaaacaggttttcccacatatcggtcaccagcgcctggtcacgcgggctcaattcaccagcaccaatggctttttccagactctggctaacggtcgtatgcaccgcctgagcggagtggtcatcaccactttccagttctgcgatggctaatgtcaggtggccacgcaaatacccactggcaaacaactcatcatcactggcatggtcaaccataccgtcgattaatgccagaatgcgactttcaaactccgcgatcatcttctttcctcattgtaaaacgtggcgctggcttcagttgagcgcttccggccacgggaactgttccgccgtaagttccggcgtgtgataataattttgtagtgctttaatgaagcgtgccggacgttccggaatgccatttgtcagataatccatcacctgcgcatgtactcgccgttgaaacaccacacgatccggttcgaaatccccttccagattgtcgcaactgacgttaaacggatatcccgccgccacacagaacaaccagtcgagcgcctgcggcttcacttcaacatcttcaaactggctttgcgtttgggcatcgcgtccgtccgggcaataccagtagccgaaatcaaccagctcacggcgcgctttcccggcaatacaccagtggctaatctcatgaattgcgctggcataaaagccatgagcaaagacgattcggttatacggtacttccgcatcagcaggaagatagatcggttcgtcgtcgcctttaatcagacgggtattaaaatcatcggcaaagcagctattaaaaatttcaatcaactgctcgtagtggtgtgtactgttcattagttcatccccaaccagtggaggatctcctgtccgtggctgtcgtaaagtaatttggcactcatcaccgcgctgacgataacaatcatcgggcggatcagcttttgtcctttgctcaacaccagtcgactacccatgcgcgcgccgaggaactgccccaccagcatgacaaagcccgtcgcccaaatcactttgccgccgagaataaacagcagtaaaccgccgatgttactcgttgcgttgagtaatttggcgtgagccgtggctttggcgaggttaaatccgcacagcgtaacgaaggccagcgcgtaaaagctcccggcagccgggccaaagaatccatcataaaaaccgacgcagccaccggctattaacgcgaagggtaaaccgtacatccggcgctggcggtcttcttcacctagctttggcatcagcaagaaatagaggccgatacaaattaccagaatgggcaaaatctgccgtaagacatcagcctgaacgtattgcaccagcagtgcgccgctcatactgccgacaaaggtcatggcgatattgagtttctgatcgcttaaactaaccactttgcggcgaataaagtagatagtagcggaaatagagccgccgcaggcttgcagtttattggttgccagcgcattagcgggagacatccccgctgccatcaatgccggaatggtgagtaacccaccgccaccggcaatgctgtcgataaatcccgccagcatggcgacaaaaaagagaactcccagcaacagcggggaaaccataaacaggctattaaacgtttccattagatcacgtgctcatccagtagcgcctggcaggaaggcggcaacggaggcggtgtcttcttctcaggctttgttgttcccggttttggaggttcaaaccagctttgcagttctgccccgcaaccatcgccacttggcggtaaaggttgatcttcacactccagactatcggcagggcaacgtaatcgtacatgcatatgcgcgcgatgctggaaccagggtcgcactttgcgcaaccagtcgcgatcggtgcccgcatcaaggcaaagttgttgtttaatcgccggattaacaaaaatgcgcgtgacgtctttgtcctgggcggcgagtttgatcaagctgaaaatttctggcttccacagcgtggagacaacgtgtttaccgtcgcgggaaactaagtccagtgcttgcgggcgcaagagctgcgcggaggtccagcgagttttcggcagttgcagaaagatatcgacatccagtccggtctggtggctggcatgaccgccgttgaaacgcccaccagcgggcatccccatatcgccaatcagcaccgtacccatgcccagattgctcacctggctactcagacgctggataaacatcaccagatccgggtgaccgaaatagcgacgctgatcggtacgcatgacctgataatgttcggactgtatcggcagcgtgtcagcgccgacaatacagccattagaaaaactgcctatgctttgtgcgctacccggcacaggttgggttattttttgccacggcgtcgctgccaggctggcgctactggcaagcagagccagcagcgcaatcgcggttttattcattttttaccagcgtggaatatcagtcttcacatcggcattttgcgcccgttgccgtaacaggtgatccattaaaacgatcgccagcatcgcttctgcgatcggcactgcgcggatcccgacacagggatcgtgacggcctttggtgatcatctcaacttcttcgccaaagcggttaatggtacgacccggcacggtaatgctggaggtcggtttcagcgccatatgggcaatgatttgctgcccgctgctgataccgccgagaatgccgcccgcatggttgctctggaaaccgtctttggtgatttcatcgcggttctggctgccgcgcagcgccaccacgtcaaagccgtcgccaatttccacgcctttcaccgcgttgatgctcatcagcgcatgggcgatgtcagcatccaggcggtcaaagaccggctcgccaagtccggcaggaacgccactggcaacaacggtgactttagcgccgatggagtcgccctcttttttcagcgcacgcatcaactcgtctaacgcgtcgattttgtcggggtccgggcaaaaaaacggattttgctcgacctggctccagtctttgatatccagcggaatgtcgcccatctgggtcaggcagccacggatttcaataccaaatttctcggcgagatattttttggcaatagctcctgccgccacgcgcatggcggtttcgcgggcggaagaacgtccaccgccgcgataatcgcgcagaccgtatttttgttcgtaggtgtaatcggcatggcctggacggaaaacgtccttaatcgcactgtaatcctgagagcgctggtcagtgttttcgatcaacaagccaatgctggtgccggtagtaacgccttcaaaaacaccggagagaattttgacctgatccggctcgcggcgctgggtggtatagcggcttgtcccagggcgacgacggtcgaggtcatgttgcaggtccgcttccgtcagcggaatgcctggcggaacaccatcgacgatgcagccgagcgccagcccgtggctttcgccgaaggtggttacgcgaaagagttgtccaattgtgtttccagccatcacggctccgttattgttgtgtttgcgtgtttacttaatctttataaatcgcgaaatgttctcgtgcggcaataagctgctctttggtgagcataaacacaccatcgccgccgttatcaaactccagccaggtgaacggaacatccggatattgttccataagatgtaccatgctgttgccgacttcacaaatcaacacgccatcatcagcaaggtaatctgccgcgttaccgagaatgcgacgcgtcagtttcaggccgtcagtgccagatgccaggcccagttccggctcgtggcggtattcgtttggcaggtcggacatatcttccgcatcgacatacggcgggttagtgacaatcaggtcgtactgcactttcggcaagtcgcggaacagatcggaacgaatcggaatgacgttgtggatcagaccgtgttcttcgatgttctgttcagcaaccgccagcgcgtctggagagatatccaccgcgtcgacttctgcatccgggaaggcataagcacaggcaatggcgatgcagccgctaccagtacacatatctaaaatatgctgcggttgcttgctgataagtccggcaaatttattgttgatcagttcaccaatcgggctgcgcggcaccagcacgcgttcatcgacgtaaaattcatggccgcagaaccacgctttgttggtcaggtaagccaccggaatgcgttcattgacgcggcggatcacgcgttcaacaatacggtgtttttcgctggaggtcagacgcgcggtgcgcatatcttccggaatatccagcggcaggtagaggctaggcaacaccagctgtacggcttcatcccacgggttatcggtaccgtgaccgtaccagatatttgccgcgctgaagcggctcacgctccagcgcaacatgtcctgaatggtttgcagctcatttactgcttcatcaacgaaaattttatccacgtattcctccagggcatgatcgcaataatttcggcggctagtttgccatgaagatgacgataaatcagcattcacgcgcggtgagtgaggaaaaatacgtttaaaacgatcgattgcgctacgagtcgggtaaactgtaggaaaattagaaatagagacagataaatgaaaaagaaaacaacacttagcgaggaggaccaggctctgtttcgccagttgatggcggggactcgcaagattaagcaggacacgattgtccaccgaccgcagcgtaaaaaaatcagcgaagtgccggtgaaacgcttgatccaggagcaggctgatgccagccattatttctccgatgagtttcagccgttattaaataccgaaggtccggtgaaatatgttcgcccggatgtcagccattttgaggcgaagaaactgcgccgtggcgattatagcccggagttgtttttggatttacacggtctgacgcagctgcaggccaagcaggaactgggggcgttgattgccgcctgccgccgtgaacatgtgttttgcgcctgcgtgatgcatgggcacgggaagcatattttgaagcaacaaacaccgctgtggctggcacaacatccgcatgtgatggcctttcatcaggcaccaaaagagtatggcggtgatgcggcgttgttggtgttgattgaagtcgaagagtggctgccgccggagttgccctgaggagttgagcgcgttgcgccaggtacgggtaatggcaggggcgaatgcccctgcctggtgtatctaagggttacaactcattcagtatgtactggaaccggcaagtagaatcgattggctgcatactgctggtatcaacacgcacgaccatatcgtgtaactgtttgtccgttatagggtgtcgatttggcgtgacgctgacttccgccttgtcacatccgctcgcggtaaaagttatcatctgtgcaacccagcggcagtaaccacctgtttcattcatctgcgtactgtcgcacaacttcccatctttcatcaaatacgtactaagcgttttctcaaccacaccgcccgtgctctgcagggtgagcagtttactcttactgacataattctcattccaactaacgtcataaggttgaacagaaacggatggacaaatcgtgtcgtgactatcaggcccctgatacgtcacgccccctggagaggcttcagagtcattcataataaccaaccatggacaagaaaagtaagattcaatctctgcagagacaataacctcaaatgtataatacccgcagttccacccagacggtaatccaggacaacttgctttgttgatattttgatggtagccaatcagcttaacgctaggggcaggaggaggaccactccagctcacattttgcaatatttccccagtcatgagccattgactacttttatattcaccaacgtacactgcggatggcatcattatttttaaattaaaagtcgcaatattacggctatcaccgttgtaaccgtagtaaacgtcaacgctatgcccggcagccatagcttctgtagtagcaataagcatgaccagagcgaacaaccatcgtagtattttcattttaaatatactcaaatgtcgcagttaaagaggcggtaaattcaccgatcgtcacatcacggccgcttttcgcctgtagccaggctctgaaattgatatcgttattgccattggttagcgcaaaggtcgccccatttgtattgttgatggcaacctgcattccgtcggttttttccatgccaattcccactccctgagcggtactactcgtatccagtgccagaaaaccgggttgttcgctgtcttctacccccgtgagcgtgacttttacgttgtatcccgccggccctttgcaatctttcagcttaaagactacgggtacacgagcggactggcctgcaacgttcaaatcctgacgactgaccgtgggaaagcgcacctctgccagatattggccatccaccaccagcgcacaggatttacttaataaattaccggagaaatgcagattattatctgccgcgaataacgtgctactcattgccaatatcagccccgctaacaggacgtaaccaccggactgaatcatacttttattcattgataatccacccgtaatgttgcgtaagcgctaaaattcgtatcgcttaacacagcatcactcgcttttaccggtacggcctccagcttcggcttttgcgtaaaatcagtggcgttgatagcaagcggagtattgagtttaaaacgctgaccatcgtgctgaagctcgataccaaaaccgggtacatcagtttcaattgctgcatcattaaaactggtttgtgtaccagtccaggtgagggtcatctcccaatctggatgacgggtcgtgctgtcacaagtgagttcatatggcacctctttacgaccatagttgccgttgatgtcgtcgataatgagatcgcgaaattcgacttcaatggttttaccaccgctgatgctacaggttggcggactcaataatgtcccgtgaaaggtgatgtcttcatcagcagcatgagctatggcgctactgacacaaagcagggttaagaaagtctttctcattgatagtccaccaccatggtcaaactggcgttaaactcgcccgcagcaagttgcgccccgcttgccttcacaggtacagccttcaactgtggctggttattgatattaaatggcgtccagctattttcaccgacggcaaacaaactgttatcggcgctattttctatccgaatgcccagcccggtgatattggtactgagtaccgtttcgccgttaatcgtactggtattgcccttaagttgcatccgcaagtcgttagcaagactgtttgtgcagttcaacgtgtatttcgcatcttgccgataattggtgccatcaacgttatcagcaatcatattgccgaactctacctggctgcccttgatactacagggtggcggagcatcgaccaacacgcgcagaattaaatccacgggtttactaccagccatagcagataaactacagacactgcataccagcagccctgcgcccactacaaacttttgactcataactccccccgtcatcagcctttgcggctctgctcttcatccacctggcagctgttgccattgcactggaagaacagcggcatccgtgcgccaaagtcgttgacgtaagtcagcaccggtacgctatccattttcacattcagcggtaccgtggttttcggctcaatgaccagagggctgaaccctgcagctggattaccgtttttctgcgcactggcgttgctgataatcacgtagtacggcgttgggttattgacggtaaatgcctgaccgctgcgggtgagcgtcaccttgtgctgccacggacttttcatactgaccttttccagcgcctttggtcgccagaacaacttgatacgcgtttgcagcgcgatttgcagggtattgggtttgttactttttggcgggatctcgcgcacgttaaagtagaacatgctttcacgatcggctggcaatttgttgatatccggcattccctgcacttttacctgcccgttcatcatactatcgatgcgttgcactggcggcagcacagttaacgggctggtgatcttgttacccttttcatcttcaatccagctttgagccagataagggagtttcggatcgttattacgcagcgtcacgctgatacttttgtcgctttcattaaatatcaaacgggtacgatctggcgttacagacgccagggcagacaaactggtagcgctaagcagtaacgccagcgtcatagcacccaatttggcagagcaaagtaaatcagacatggatcattccttaatcacgttattggttagcactaacagaaacagggggatcggtgggtgtcacctgttgcgtctgctcctgaatgacaggctttatgtcatcaggaacaaccggcgcgacgttgcctttatgctggcatggcagtaacaagccgttaaacagatcggcaggcagcgggtccggcaggttgatatcgcaatgcgcaacaccactccagaacacactcatatgttcgccaggtttcaccccagccagatagacactaccgtcatcatcgacaaggcccactgtctgctcgttatcattttttacttctgcgccaaacggtggatggctgccatcttgtaaacgcagcaccgccatcgctttttgaccactgatgacggcaaatttgcggtagccaatggctccttcagttagcgtggcttgcaccacgctctgggttgcttcggcgttttccggcaatttgttgaggtcgatatacgcctgattgcgataataattgttaacgtcagaaacgacggctttaccaaacatattggtataaacagcagccccgttaccttccaccggaacatcggcaacgccatcggcatcaatcagcaggcgtgtcccgcccatattctgggtacggtgaagtgcgccgccgtgggtagtaagcgttgcgccgccctgtaagctcaagcccgcagaggtgtattgcccttcatggtagttcgcactgaggtcaacctgcgccaggctaccatcatggctgtagtagccatcaacgctggtgtgtttgtcactggtgccgatgttcaactgatagtgagtcgcgtcatcgacacggctaaaataaccgacctggctgctgtccgtcccactgccatagttgccgttatagctaacggtactgttgtcgccccacggcatactgagcgaaatttacatgcccttatccgcccggttgtcatactcgtagcggtagccagtcagggaaacgctcatattacgaatgctgcccatattgaaatagtgggagagcatgatgttgtagtttgtctgctcctcacgatcccagtaggtatggcgggtatagttgagataaacgctaacacccgcatcgcggaagttctggttataagtggcggtgtacatctctttgtcgttgcccgtacggaccatttcgctgtcactggcatccagatactcgctcatggtcataaagttctcttcgctgaagcgatatccagcgaaagtgacgcggctgttgagctggtcaaagtctttggaataactcacacggaaggagttaccgtccaggctacctttgccataagcggtgtctttatccagtttggtatggctatgagtaacatcaaacgcgaccgcgccgaaggtagacaaatcgcgaccgacgcccagcgccgcagactgatagttttcatcacccagcgcaccgccatataagctccagccgttagcgatgccccaggaggcttcagcaccagagaaaaatcccccctcgacatggtggccccactcttgcggacgtcccatcatgatcttatagcgaacctggcctgggcgagtgaggtatggcatgctggcggtgctgatgtcatattcctgcacctggccgttctgttcttcaatgcgaatatgcaacgtaccggagacggaatcaccaagatcctgaatacgaaacggtccagccggaacctgcgtttcgtaaatcacacgccccatctggctgacggtcacttttgctgtggtgtgtgccacgccggaaatgtctggcgcgtagccgcgcagattgggaggcaacatttgatcgtcagtgctgacactgccaccaacataattaaaaccgtcgaaaatatcggaattgaggtaatcttcgcccagcgccagtttggcttttaaactcggtaacgcccgccaggcataatagcgactccactcccattttttttgtgtgtcatcgccgccaaattcatcgtcatcatcattactgcgcgtatgttgatagttggtctgccagtcagcgcgcatacgccatggccccaggttaaccccgaccgtcccgttgccgctgatctcgttactgtcatcgccgccattttcttcgtgtcgtgtttgcgcagtgatgctgtagtccgcaatgatcccggagatgccatcatcccaacgagaaggtggatcccagtcgggccaggtatattcgaggtaagcctgcggtagactaatgactaatgcggactggcttaaatcagccttaatttccacgccttccagttgaccgggcttcaggcatttaccatcgtggctccattgcagatttttcgccacgtcttcttttaaaccaaactgcgccaccagttccggtgtcagacaagcatagcttttgctaacgtcatcttcaccagcataccagtaaatatcgtactcttccgccaatggctgtttatttagttgaacctgtaaattgtattttccgggctcaacatacccctggctggaaaaacgcttcagatcaatttttgtgtcgccttttaattccagaaaacgggaatcaaactgaatgtcgtcttcagcccagacactgctataactcccactcattgccagcgcaatgcaccacggaagaatccgtaatcgaaaaagagaatggtcaggcatacacgtttttatccgtttttattcttgttcggtcaaaatccatttaaataccccatagcagtgtcgctatgggggtatgccttacaggtaagtaatctggaaggtggtatttgcttcgaaattacccagatctggcgcatcagctgcgccgaccagccaggctttaaagttcagagtctgcttcgctttgcctttattagtggcagtatctttcacgattttctggtcaatacccatgccgcttttgtaagaggtacccagagagtcaccgatcgccaggctaacattgttaaatgccgcaccggtatcggtattgaaaatggtgtaataattgccgctatttgcagaagaaacggtaccagtaaaggtagtggtcattgtttcctgagtatcaaatacgcaatcttgcaggcgaatctggaaatttttcggcgtggtggtgccgttatttttcagtttttcggcaccgatatcacccatatcaacttccagtttgtgatcgtccggaacgatagaacacacactgtcttcaatggtgccgtaaaaacgtgcagtaccgttgttacccgcagcgattgttgccgtagaggtgaacgcgcccatcaccattgccgcagcaatagctgttttaacaaacttactcattatttgtccttaaactataaataattaaaatataaacattgcaatacattgattcagtcaatagccaatgtttatacccagccattgaatacggcatgcgatccaaaaaaacaggtcgtaaaaaatgtattcgttggtgtggggtcgaatagtgatgttttcactcccctgattcaatttaattttactaatgagtaaatgtagatttaattaatatattgataggggaaagattatcttaaggatcttctaaaaaaacacgaaatatatatttagaaaaaacaggaagcatatcaacaatgaatgccaatagcttaaaaaacaaacaatgaacatataatgcgattggcattaacccgcttttgtcgatataatatataaacactatagccagaatttaatcaagtttcaattacgtcctgcctgattattcaactctattttctccattatctgtattaataaatgataatgagtgtcaaacagacattattcatttcaacatgtaactttgggcaaaatcaagatacgcgcagaagaatactttccgaatgaaagttaaaggtgttttatttatagatggggagagtcttcgatagtagtgaggttgacagatatccgctgcctgatgagcaattatgcccaatgaatctacctcattgggcataatttggaactcatcagatagcttttgccatcttcagattacacgggctcatctgccagttgaatgtgccgtttccgctttcatcaagcgttacgctggcaatggcgctggtggtaaacataggcggcgtttcgcccggacataactcggcaaccagatacccgactaacggtaagtgagagatcaccagtacgctagcaacaccttcattggtcaacgcctgcaaataggcactgaccagaccaacatcgccgcagggcgttaactccggcagaacttctgcactggaaggcaggttcagacaatcccctacttcttccagtgtttgctcggctcgcaggaacgggctcaccagaacgcgttcgatttccactttttgacctttcagccagttcgccatcaggcgagattcgtcacaaccattagtggtcagaggacgaacggaatcactggcggcatcgagggctgcgtcgccgtgacgcatgataaaaacttgcatattgcaccgcttttgttaaccagattcgcccgttttctttcatctgaaaccagagaaagaaaacggtggccggcattgtgccttatccattcaccgaatgaaacgctgttttttacctcaatggcgtaagtatagtcaatatgcgtttacattttgaccaacactccgccattcagcgcggattcatatagctttgaccttcttattgcaggtcagttgcagttgttttccaaaaactttccccacgcgcgcccatctcgaccaaacgctcgcaaggggtaaaacgggaaccatactgcgtggcaagtcgttgcattattgcaaccacttcgcccgcgccgagagaatcgatatagcggaacggtccaccgagaaatggcggaaaaccaatgccaaataccgcgccaatatccccgtcacgcacgctacggataacctgctcatcaacacaacgtactgcttcattcagcatcaacatcacacaccgttcagcaacctgcggtgcggagattcgcccctgcccttgtgtgccaatcagcgggtaaatggcgggatcgacctgttttttgcttttacgccctttctgaccataaagatagaaaccccggccattttttctgcctttgcgatcgtcgttcaaaatactagaaacaacatttgcaggcgcgctaaaacgttctccataagcggcttccagtacaggaataattttagtcccggtgtcgattcctacctcatccaaaagttggattgggcctaccggaaaaccaaatttcactagcgcggcatcaatgtgctctacccgttcaccttgggtcaacatgcggatagcttcattaatgtaaggcgctaagatgcgattgacgtaaaaaccggctttgtcacgcacgacaattggcgttttaccctgttttttcgccagttttactgtggtagcgatggtttgcgcgcttgtccccgcatgaggaataatctccaccagcggcattttttccaccggactgaagaaatgcaggccgataacttgctcaggtcgcgtggcgtgagcggcgatatcaccaatcggtaaagaactcgtattgctagcaaagatggtatgagcggcgcaattttgctcaacttccgccaccatctgttgtttcaattcgagattttcaaacaccgcttcaataatcagatcgcgatgggcaaagccgcgatagtccgtcgttccggagattaatgccagctgtttgtcacgttcgctggctttgagatgacgacggcgaactttgccctccagctgatcccaactgtacttcagcgcatgatttatgccctgcgggttgatatctttaattctgaccggaatccccgctttacaagcagtgacataagcaataccgccgcccatcaagccaccacctaaaatccccacgctgtttaatggcgcaggcggcgcatcactgccgggatctttcttcacgtccgtactggcaaaaaagatactacgcagcgcctggctttgtggcgtcatcgccagttcgccaaacgcccgagcttcggcgtcataaccgctgctggtgccctgcgctaatcccgtttcaacaacctccaggatgcgttctgtcgccggataattgccttgagttttgtgttctgttttcttgccgaccattttgaacagcagcgcacgacctaacggccccgccagaatacgctcgcgtacaggtagagggcgggaagatgggcgctccttctttgccagctcaacagcggcttccagcagaatggagtgcggaacaacgtcatccaccagccccagctttaatgcctgtttcgcccgaagttgttttccggtgaggatcatctctaatgctgtgctgacgcctatcagacgcggtaaacgctgggtgccgccactaccgggtaacaatccaagttgtacttcaggcaaaccgagcaccgttttaggatcgtcagtacaaacgcgaccgtggcacgccagcgccaactccagcccaccacccaggcaagcgccatgaatagccgcgataacctgaatgggcaaagcatgaatctccgccatcaactgttggccctgccgcgccagagcttccgcttcttgcgccgttttgcagttgccgatcatgttgatgtctgcgccagcaatgaagttgtccggtttagcggagacaaacaccacgcctcgcaactctttgttttcacggagttgcttaataatggcgcgcacctggctggcaaactccgccttcagggtattcattttctcacccggtacgtcgatggtgataacggcaatgttgtccagacgaacattaagggtaaacgcacttgtcatttccattattccgcctccagaaccattgccgcgccaagcccaccggcagcacaggcggtaactaaaccaaatccaccgccgcgacggcgaagttcatgcaatgtctgggtaatcatccgcgcgccggtcgccgcgaagggatgcccgtaagcaatgctaccgccaagcacgttaaatttgctatcgtccacttcgccagtggcatgtgcacgccccagtgcttcacgagcaaaacgttcactacccagcaactgaatattcgccagcgtctgagctgcaaaggcttcgtgcatatcgatcaatgtcagatcgctcatcgtcaaaccggcacgctccagcgccagcggtgtactccaggctggaccgagcaacatgtcctgccagacatcaatcgcagtaaatgcgtagctgcgcagataccccagcggcaccagccctaattctttcgcccgggattcagtcatcaggatcaccgctgccgcgccatcggtcagcggcgtactgtttgccgccgttaccgttccgtgtttgcgatcaaacgccgggcgcagctttgcgtaatcggcaaggctggaattaccgcgaatattgttgtcttcgacaagcggttgtttataaggagggataaaggcagtcatcacctcttctttgagttttccgtcactccatgcctgagcggcacgctgatggctacggtgcgctaatgcatcttgctgttctcgggtgatgccgtaggttttcgccatttgctctgcggtgtcgcccatccgcaagccggtagaatattctgctaccgcaggtggtacgggcattaagtcgcgcaaacgcaggcgagagaagagtttcagtcgctggctcatggtacgagctttgttgacatcaaccagcacgcgcgccagttttttactgacgccaattggcaatacgctagaggaatctgccccaccggcaatccccgctcgaatagttcccgccatcaggctttctgcgacgtttgcaactgcctggaaactggtagcgcaagcgcggctgacgctgtaagcatcggtatgtacattcattcccgtaccgagaacaatttcacgcgcaatgttgggggcttcaggcatttgtacgacctgaccaaagaccagttgttcaatcacttcggcggggatctcgctgcgtgccagcagttcgcctaccaccatcttccctaaatcaaccgcgggaatgccatgaaaagccgtcgcctgacgggcaaaaggcgtacgtaaaccgctaacaatggcgatacgatcgccctggcgggtaaccagcggtaaaacctgacccataacactcccctgtaaaaaaataaataaagtggtctgacctgatcatagtcttaaccatttttttacatttagccaagtggagaaaagggaaagtgggagctatgacacagagagaaaagaagaagagaaaagaaaacgcccctgccagcaactgacaggggcgtacgtacccgagaggaattaacgcagacccagctggaaaatcagcatttcagcttcgcaggcaaaagtgaaatcgatatccaggcgcacaccgtcagactcttcagtgaaagtcggggtgattttgcaaggttcagattccacgctacgggctttttcagtcagcgccgccagcgtttgctctgcttctgcgcggtttgcaaacacgcggctgtaagacgcggtgcagtcggagttgtccataatggtgccaacatccatacagcagcaaaccggggtttcatcagcactacatttactcatcgttgatttcctctgtatgtgcacccaaggtgccagataaacgttgtggatattttacgcttccggaaagtgctgctccagttgttaattctgcaaaatcggataagtgaccgaaatcacacttaaaaatgatctaaaacaaaattcacccgaatccatgagtgcgccacctccaaattttgccagctggatcgcgtttcttagatcatatttgaaaaaagatagaaacatacttgcaacattccagctggtccgacctatactctcgccactggtctgatttctaagatgtacctcagaccctacacttcgcgctcctgttacagcacgtaacatagtttgtataaaaataaatcattgaggttatggtcatgagccagaaaaccctgtttacaaagtctgctctcgcagtcgcagtggcacttatctccacccaggcctggagcgcaggctttcagttaaacgaattttcttcctctggcctgggccgggcttatagtggggaaggcgcaattgccgatgatgcaggtaacgtcagccgtaaccccgcattgattactatgtttgaccgcccgacattttctgcgggtgcggtttatattgacccggatgtaaatatcagcggaacgtctccatctggtcgtagcctgaaagccgataacatcgcgcctacggcatgggttccgaacatgcactttgttgcaccgattaacgaccaatttggttggggcgcttctattacctctaactatggtctggctacagagtttaacgatacttatgcaggcggctctgtcgggggtacaaccgaccttgaaaccatgaacctgaacttaagcggtgcgtatcgcttaaataatgcatggagctttggtcttggtttcaacgccgtctacgctcgcgcgaaaattgaacgtttcgcaggcgatctggggcagttggttgctggccaaattatgcaatctcctgctggccaaactcagcaagggcaagcattggcagctaccgccaacggtattgacagtaataccaaaatcgctcatctgaacggtaaccagtggggctttggctggaacgccggaatcctgtatgaactggataaaaataaccgctatgcactgacctaccgttctgaagtgaaaattgacttcaaaggtaactacagcagcgatcttaatcgtgcgtttaataactacggtttgccaattcctaccgcgacaggtggcgcaacgcaaagcggttatctgacgctgaacctgcctgaaatgtgggaagtgagtggttataaccgtgttgatccacagtgggcgattcactatagcctggcttacaccagctggagtcagttccagcagctgaaagcgaccagtaccagtggcgacacgctgttccagaaacatgaaggctttaaagatgcttaccgcatcgcgttgggtaccacttattactacgatgataactggaccttccgtaccggtatcgcctttgatgacagcccagttcctgcacagaatcgttctatctccattccggaccaggaccgtttctggctgagtgcaggtacgacttacgcatttaataaagatgctagtgtcgacgttggtgtttcttatatgcacggtcagagcgtgaaaattaacgaaggcccataccagttcgagtctgaaggtaaagcctggctgttcggtactaactttaactacgcgttctgataacgcgttcgcctggataaagtcacctgcatagcaggtgactttaactcccccacttcaccgaaagtagtgtcctcattgcttacctcctgagttttgcaaacagcctgttggcagcttgccctttcaaatcaataagcggtatccacagacaaacctgaagggaaaggcatattttcaggcgttctgctcgtccttctcaaagagtttacttttctgcatttccaggatactccccccccctggctattgtgcgctcatacactcaaattaaagataggttctaaataaatgagcgttttttgatagtctatttcattaggtaatatatatttgtaacaaatcaatcaaaatggaataaaatcatgctaccatctattagtatcaacaataccagcgcagcttacccagaatccatcaatgaaaataacaatgatgaagttaatggattagtacaagagttcaaaaacctttttaatggtaaggaaggaataagcacctgtattaaacatctacttgagcttataaaaaacgccatacgagtaaacgacgatccttatagatttaatattaataattccagtgttacttatattgatattgactccaatgatacagaccatattactattggtatcgacaaccaagaaccaatagaattacctgcgaactataaagacaaagaactcgtccgtactatcattaatgacaacatagttgagaagactcatgatatcaataacaaggaaatgatcttcagcgcattaaaagaaatatatgatggagatcctggttttatcttcgataagataagtcacaaactcagacatacggtaacggaatttgatgagagcgggaaaagcgaaccaacggacttatttacctggtacggtaaagataaaaaaggcgactctctcgctattgtaattaaaaataaaaacggaaatgattacttatctctcggttactacgatcaggacgactaccacattcaaagaggaattcgtattaatggtgatagtctcacccaatattgtagtgaaaacgccaggagtgctagtgcgtggtttgaaagcagtaaagctatcatggcagaaagttttgcaactggttccgatcatcaggttgtaaacgagctcaacggggaaagactgagagaaccaaacgacgtttttaaacgttatggtcgagcaataagatatgattttcaagtggacgatgcaaaatataaatgcgaccatctaaaagaaatagtttctactttagtcggtaacaaaattaacgttggccattctcaaaaaatatataagcattttaaggatctcgaaggtaaaattgaagaaaggcttcaaaatcgccaggctgaatatcaaaatgaaattaatcaaccatctgcgccaggtgttaattttgatgatatttaaaattatttttccagttttttgatttttcaacagctgaatatcggaaatagtcagtgacgaacatcagtatttttacataattacgtctaggtcattgtcggtttatctccttttacttgtggtaattgagggataacaacaaaaaaggtgagttttgcgactcaccttttttatttgtttcttattcagaatcaatatcttttaaatcatcctgaatcgcttgtgcgttcggattttcctgcggtttgagttcgccgccattagcgatgaaatcatgacgctggaagtacgcttcgcgcaccataatataaggatcggagctctgacgcagcagaccatcggaatccagcagctgagcgcgggtttcgatcccttcaagcgtccatttacccacagacatcggccaggtcagccaggaaagaaccgggtaaaaaccatccgccatatcaccaccgtcatcacgcagcgtgaagctaccgtagaacggtaactgaacgtaaggcccataacccacgccataatgaccaagcgtactaccgaagcggtgaggttcagtccgttgcagtttcgggttcgccatccctgcaacatcaataaaaccgcccatccccaaaatggtgttcaggaaaaagcgggtaaagtggaccatcccctgataagggtcgccctgcaagaagtagttaaccatcaccgcaggttcttcaaggttgccagtaaagttgctcaaaccgttacgcgccggttgcggaacataatcacgccaggcgacagcgaccggtcgaacaatatacgggtctaatacattgaagttgaagttgtacatggtgcggttgaacccttctaacgggtcagaacgcccttgctgatctgtaccggaactcgcacaccccaccagaagcgtagttcccagagcaagcgcgctcaggcgaagcttcataaatgtctccctgtttttttatggcttatgcagtttgccatccatgacggaacgataccgtatccgcctgtttaggtgtgggcgattgtaacagcacgtcaactgatgtccagacgccctgatttgctgatttgatcatagcctggtaatcgccgccctgtaggctacttgattctatagaaacagaaaaaggcaaacgcagccttttctacattttcagagtaactcccgtcagttgcgagcaaaaaagccgctacgctttagctatacgtgctaattcaagagaagagaccatggacaacgacaaaattgatcaacacagcgacgaaattgaagttgagagcgaagaaaaagagcgcggcaaaaaaatagaaatagatgaagaccgactcccctcccgggcgatggcaattcatgagcatatccgccaggatggtgaaaaagagctggaacgcgacgcaatggcgctactgtggagtgccattgcggcgggtctgagcatgggcgctagcttactggcaaaagggatatttcaagtcgaactggaaggtgtgccgggcagcttcttgctggagaatctcggttatacctttggttttattatcgtcattatggcccgccagcaattatttaccgaaaataccgtgactgcggtactacccgtcatgcaaaaaccgacaatgagcaacgtcggcttacttatacggttatggggcgtcgtgctgctgggtaatattctcgggacaggtattgcggcgtgggcatttgaatatatgcctatcttcaatgaagaaactcgcgatgcatttgtcaaaatcggcatggatgtgatgaagaacacccccagcgagatgtttgccaacgcgatcatttccggctggctgatcgccactatggtttggatgtttcctgcagcgggtgcggcaaagattgtggtgattatattgatgacctggcttattgccctgggtgacaccacccatatcgtggtcggttctgttgaaatcctctatctggtgtttaacggtacgctgcactggagcgatttcatctggcccttcgcactacctactttagcggggaacatctgcggcggcacctttatcttcgcgttaatgagtcatgcacagattcgtaacgacatgagcaataagcgtaaagcagaagcacgccaaaaagcagaacgtgcggaaaacattaagaaaaattataaaaacccggcataaatggcgagggtttaagcaatcgagcggcagcgtacttaccccgcactccattagcgggtatactcatgccgcattgtcctcttagttaaatggatataacgagcccctcctaagggctaattgcaggttcgattcctgcaggggacaccatttatcagttcgctcccatccgtaccagtccgcaaaatcccctgaatatcaagcattccgtagatttacagttcgtcatggttcgcttcagatcgttgacagccgcactccatgacgggtaaaaagtggataaaataattttacccaccggatttttaccctagagccatacagcctcacactcgatgaggcctgtcagtttcttaaaatatcctgatctaccatcgccgtcatagagcgtatttttattacctgatttgcaggttcgattccctattcggagatagcactcatgcaacacgaactacagcctgatagtctggttgatttgaaattcatcatggctgatactggctttggtaaaaccttcatctatgaccggattaagagtggcgacctgccaaaagccaaagttatccacgggcgagcaagatggttatatcgtgaccattgtgaattcaaaaataagctcttaagccgcgccaatgggtaaaatagcgggtaaaatatttctcacatctaaaaaacaccattccaatcaatcccctgctgcttcaagtagatgtctgcaggggacaccatccttgtgtttatccctaaaaccacataaaaaccgtaaattaaattcgaactagcaggccgaataaggcacaccaggaactcgtggttttattcattaactagtggtttttacctgttctcttagccagataataaacgcttcaatttttggccactgcctgcccggtaatgtggtgatgtaataatgctgatggcatttcaccgtcatatcgccaaacggcgcgacgagctcaccactggcaagccttttttgtaccaggcgttttcttcccatcgccaccccaatatgattcatcgcggcaataacagctaaatcagaacgatcaaagccaattccagaagatgtcggcaaattaaccgcataatgttgcgcccaactatgccattcatccgtaccggagtcgttgctccatgcctgtctgtcatggagcaacgtacagtgacacaggttaattaccgtgttggttaaagcatgtctttgagcgtattccgggctacatactggcaggatttcttcatccatcagaaagtgatgagtgagttgcgcactcggcgcatcatcaaagtagatcgccaaatcgattccggcacgttgcagattgacgttgtcattaccagtgagcacggtgaggctaatagacggataccggcgtgtaaagtcacctaatgcgggcaccaaccagcattgggcgatagagggccgggaatacagagttaacgttccgcttaactcctgatttttgatatcaagaatttcctggttcagggtatccaggctgctttttagcgcccaataaacacgtttcccctcgtgcgttaattccactttgcgatgggaacgaacaaacaactgaatgcccaattcttcttccagctgattgatacggtgacttaccgcactggggctcaggctcaattcctctgccgccagggcgaaggactgatgcctggcagccacttcaaaagtatgcattttacttaattgccagccgttaagcagccgatttcttatttcacgaaggggttccataatcacctcatttttcgcttaagtgtaaaaaaatagcggcaaaatttcagctatgagatgagctaaagtgaaccatatctcaattcaccttcatttttagatgtaaatcactccattgatgcaatttacctcatgtgaaaggcaaattttatcgtttgtcagcctgcgttgtttttttgtccaatatcatcaggttaatcacaggggaaggtgagatatgcactctcaaatctgggttgtgagcacgctgcttatcagcatcgtgttaattgtactgaccatcgtgaagttcaaattccacccgtttctggcgctgttgctggccagcttcttcgtgggaacgatgatgggcatggggccactggatatggtaaatgctattgaaagtggaattggcggaacgctggggttcctcgcagcggttatcggccttggcacgatactgggaaaaatgatggaagtatccggggccgcagaaagaattggtctgacacttcaacgctgccgctggcttagtgttgatgtcattatggtgctggttggcctgatttgtggcatcacgctgtttgttgaagtgggcgtcgtgctattgattcctctggcttttagtattgccaaaaaaaccaataccagtttattaaagcttgccattccgctatgtaccgcattgatggcagtgcactgcgtggttcctccacatccggctgctttatatgttgccaataagctgggcgcagatatcggtagcgtgatcgtctacggtttgctggttgggctgatggcaagtctgatcggtggcccacttttccttaaatttctgggtcaacgactgccctttaaacctgtacccacagagtttgcagatctcaaagttcgcgatgaaaaaacactaccgagtttaggcgcaacgttattcaccatactgctacccattgcgctgatgttggttaaaacgattgccgaattgaatatggcgcgtgagagtggtttgtatatcttggttgagtttattggcaaccctatcactgccatgtttatcgccgtgtttgtcgcctattatgtgttgggtatacgccagcatatgagcatggggacgatgctcacacatacggaaaatggcttcggttctattgctaatattttgctgattatcggggccggaggcgcattcaacgccattttaaaaagcagcagtctcgctgatacgctggcagttattctctccaatatgcatatgcacccgattcttctggcctggttagtggctcttattctgcatgcggcagtgggctccgctaccgtggcaatgatgggggcaacggcaattgttgcacccatgctgccgctgtatcccgacatcagcccggaaattattgcgattgctatcggtagtggtgcaattggctgcactatcgttacggacagccttttctggctagtgaagcaatattgcggcgctacgctcaatgaaacatttaaatactatacgacagcgacatttatcgctagtgtcgtcgctctggcgggcacattcctgctgagttttatcatctaagcgcaaagagacgtactatggaaaacgctaaaatgaacagcctcatcgcccagtatccgttggtaaaggatctggttgctcttaaagaaaccacctggtttaatcctggcacgaccagtttggctgaaggtttaccttatgttggcctgaccgaacaggatgttcaggacgcccatgcgcgcttatcccgttttgcaccctatctggcaaaagcatttcctgaaactgctgccactggggggattattgaaagtgaactggttgccattccagctatgcaaaaacggctggaaaaagaatatcagcaaccgatcagcgggcaactgttactgaaaaaagatagccatttgcccatttccggctccataaaagcacgcggcgggatttatgaagtcctggcacacgcagaaaaactggctctggaagcggggttgctgacgcttgatgatgactacagcaaactgctttctccggagtttaaacagttctttagccaatacagcattgctgtgggcagtaccggaaatctggggttaagtatcggcattatgagcgcccgcattggctttaaggtgacagttcatatgtctgctgatgcccgggcatggaaaaaagcgaaactgcgcagccatggcgttacggtcgtggaatatgagcaagattatggtgttgccgtcgaggaaggacgtaaagcagcgcagtctgacccgaactgtttctttattgatgacgaaaattcccgcacgttgttccttgggtattccgtcgctggccagcgtcttaaagcgcaatttgcccagcaaggccgtatcgtcgatgctgataaccctctgtttgtctatctgccgtgtggtgttggcggtggtcctggtggcgtcgcattcgggcttaaactggcgtttggcgatcatgttcactgcttttttgccgaaccaacgcactccccttgtatgttgttaggcgtccatacaggattacacgatcagatttctgttcaggatattggtatcgacaaccttaccgcagcggatggccttgcagttggtcgcgcaagtggctttgtcgggcgggcaatggagcgtctgctggatggcttctatacccttagcgatcaaaccatgtatgacatgcttggctggctggcgcaggaagaaggtattcgtcttgaacctagcgcactggcgggtatggccggacctcagcgcgtgtgtgcaagtgtaagttaccaacagatgcacggtttcagcgcagaacaactgcgtaataccactcatctggtgtgggcgacgggaggtggaatggtgccggaagaagagatgaatcaatatctggcaaaaggccgttaataacgtttcaacgcagcatcgcaatcctttccctgggtgagcgatgctgccgatggcgcagacttaagatccccggtcttacccgctataaccccctccttttatcatcacccaacgcctttcgctgtaaacggcggtttcgcaaaccaaaccaaaaccgtaagtaagataaaagcaatagccgccatacggaaaatctcatttgcagaaatagaaagactctgctgggttatttcattattaatttcattaagaactccactaaggctaccataatatttatccataatttgactgctactattaaacacggggttaaattgatcgatggttgctgtcaactgactatggtgtaagctttcgcgtcgtccccacagcgtcattgtcaagctcgtaccaacacttccactcaaggtacgaaaaaaattactcatactgctggcattggcaaatttattatctggcaagccactaaagctaatcgttgttaagggtaaaaagaaacaggcaacggcgaatccctgaaaaaactgcggcaaaatgatgcctgtaaaatcaatcgttggcataaatgtcacagaacgccagtaatagcaaaccgcatacatcaaaaaactaaatgtcactaacaaccgcatgtctattttgttgccataacgtcctatcaaaggactaattaatagtggcatgatgccgatgggcgcataagcaagtccggcccatatcgcattataccccatcgtttcctggagtaactgcggcataaggacgatcgctccagagtaaaataaatacgcgcatgtgatactcacaataccaatggtgaagttacgggacttaaacaaactgagatcaagaatcgggttctcactggtgctctcccaaatgactaaagagatcagagaaataacacttactactgttaatattattattgtactgctgttgaaccaatccagatcgcgccctttatcaagcataatttgcaagccaccaacaccgagcactaacagggtcagtcctggtagattcattttgaccggactagtctcagtttctcttcctttaagtaaggttaagcataatgtcaggacgataatccccatagggacattgattaaaaatatccaaccccagctaaagttatcacaaatataaccgcccaatatcggcccacatatcggagcgataatcacggtcatactccataatgccagagcaaatgttcttttttctggcggataattccttaataataaactctgactcagtggaattaacggccccgccattaacccctgaacgactctaaaaaatatcagcacatcaagattggtgcttaggctacacattaaactagacaggctaaaaaaagtgacactaagtaaaaataatcttaattcgcctattctttgtgccaacctgccagtaacagggatcgcaatggcatttgctacaccaaagctggtgataacccaggtgccttcgtctgtacttgctcccagaaagccagatattgtcggtattgcgacgttagaaatagtggaatccaacatttgcataaatgtcgctaaactcaatgcaatagtgacgcaccataacgtcccaccggttaatggtgccggagtacttttagtgattgccattaaagttgtccattatggctaataatgttgctaatttctttttctatcggactggtatcgataactaaagccttactggtataagccggcatggaggtcacggtactagccagctcaggcatctcggcaatgtcttcgttcttcgtatcaatagttgctgtcatgcttaaaccaatacgcaaggggtgttccatgagttcttttggatcaagagaaacttcaaccggtacacgctgaacgattttgatccagttccctgtcgcattttgtgcaggtaataaggagaacgcattgccggttcccatattgatccctgtcacccgaccatgaaacacaacattttcaccataaagatcgctgataatattgacgctttgaccaatccgtacatccgtgagttgtgtttctttaaagttggcattaacccacatttgacgtgccggtacgacagccattaagctttgtccggggctcactgtttcgccgacctgaacacttctctgggcaatatagccggtaaccggactcttaatatccgtacgtttaagcgccaaccaggcttctttagttgcatccgccgcttcaacgacttgtggctgacggtttaatggtgtgttcattactaaagctttattcgctttataagcctggatagcggcattcaatgccgctttgctacttattaacgtatctttggtatgctccagcgtttctttactaataaccccctgcttcgctaacggcactcgacggttataatcttctaaagattgttgatactgaatacgtgcactagcgacttcggcactgtattgtttatcctgtaagtatagtttattcgtttgccgaacaatatttgccagattatttttagctttattgagtgcgatagtggcatcagttttatccagactaactaaaatgtcaccttgtcgaacgtagttcgtatctttatgattaacgacagtgacactaccactgacttgtgcagaaattggatctgcattccccgtgacataggcgtcatctgtactaatcatgtcttctaattccatactccaataggcataggcaccactaaacgcaataaataaaactaccgccaataaagaaaagtattttcttctgttagaatgttttttattactattaatctgttccactattatctctcatttctcatagatgaaatttatgaattgaatgaaaagagcattcattcttcatatcaaacacagtgcatgtgttgcacattatcccaggaacgttggaggcctaatttaaatgaggtgcaaaaaaaacaacagaggactaaaccgtggcttttgcaatacaattcttacgcctgtaggattagtaagaagacttatagtgccaacttgaaactataaatcatcggtacaatccctgattttattgttgacatttcatttatgccgactatttatatggtatacttgtcgaattatcttaaaggaagctcagattttcttatttttattgagaaaatgagatgacgccttatgtctgtattactacagggagaagggagatgcttcattgcaaagggaataatctatgaacgcaataattattgatgaccatcctcttgctatcgcagcaattcgtaatttattgatcaaaaacgatattgaaatcttagcagagttgactgaaggcggaagtgccgttcagcgggtggaaacacttaagcctgatatcgtcatcattgatgtcgatatccccggagttaacggtatccaggtgttagaaacgctgaggaagcgccaatatagcggaattattattatcgtctccgctaaaaatgaccatttttacgggaaacattgtgctgatgctggcgctaatggtttcgtgagtaaaaaagaaggcatgaacaatatcattgcggctattgaagctgcaaaaaatggctactgctatttccccttctctctcaaccggtttgttggaagtttaacgtccgaccagcaaaaactcgactccttaagcaaacaagaaattagtgtcatgcggtatattcttgatggcaaggataataatgacattgctgaaaaaatgttcatcagcaacaaaactgtcagcacttataaaagtcgcctgatggaaaaattagaatgtaaaagtctgatggatctttacacattcgcacaacgtaacaaaatcggctaaccacatgaagtttttaccctatatttttcttctctgttgtggtctttggagcaccataagtttcgcagacgaagattacatcgaatatcgtggcatcagtagtaacaaccgtgtcacacttgatccactacgtctgagcaacaaggaattacgttggttagcgagcaaaaaaaatcttgtgattgcagtacataagtcccaaacggctacgttgttgcataccgatagccagcaacgggttcgtggtattaatgctgattatttaaatcttttaaaaagagcgttaaatatcaaattaacactccgggaatacgcagatcatcaaaaagcaatggacgcgcttgcagaaggtgaagtcgatatagtgttaagtcatttagttactagcccgcctcttaataatgacattgctgcaaccaaaccattgataattacctttccggcgctggtaaccacccttcacgacagtatgcgaccgcttaccagtccaaaaccagtaaatattgctcgggtagcaaattaccccccagacgaggtaattcatcaaagttttccaaaagcaacaattatctcttttacaaatttatatcaggcattagcatccgtcagtgctgggcacaatgattactttattggtagtaacatcattaccagcagtatgatttcccgctatttcactcactccttaaatgtagtgaaatattataacagcccgcgtcaatataattttttcttgaccagaaaagaatctgtcattcttaatgaagtactcaatagatttgttgatgctttaacaaatgaagttcgctatgaagtaagtcaaaattggcttgatacaggaaacctggcctttctgaacaaaccattagaactcactgaacatgaaaaacagtggattaagcagcatcccaatttaaaggtgctggaaaatccttacagccccccctattctatgacggatgaaaatggcagcgttcggggcgttatgggggacattcttaatattattaccttgcaaacaggtttaaatttttctccgatcaccgttagtcacaatatccatgctggaacacagcttagccccggaggatgggatataatacctggcgctatttatagtgaagatcgagaaaataatgttttatttgctgaagccttcataacaacgccttacgtttttgtcatgcaaaaagcgcctgacagtgaacaaacattaaaaaaaggaatgaaagttgccattccatattattatgagctgcatagccaattaaaagagatgtatccggaggttgaatggatacaggtcgataatgccagcgctgcatttcacaaggttaaggaaggtgaacttgatgctctggtcgcgacacagctaaatagccgttacatgatcgatcattactatcctaatgaactttatcattttcttattcctggcgttccgaatgcaagccttagcttcgcttttcctcgcggagaaccggaacttaaggatattattaataaagcactgaatgcaattcccccaagcgaagttctgcgcctgacggaaaaatggattaaaatgcccaatgtgaccattgacacatgggacctatatagcgagcaattttatattgttacgacattatccgttttattagttggcagtagccttttatggggattctacctgttacgcagtgttcgtcgtcgtaaagtcattcagggtgatttagaaaaccaaataagtttccgaaaagcactcagcgattccttaccgaatccaacttatgttgtaaactggcaaggtaatgtcattagtcataatagtgcttttgaacattatttcactgcggattactacaaaaatgcaatgttaccattagaaaacagtgacagtccctttaaagatgttttttctaatgcgcatgaagtcacagcagaaacgaaagaaaatcgaacaatatacacacaggtatttgaaattgataatggcatcgagaaaagatgcattaatcactggcatacattatgcaatcttcctgcaagtgacaatgcagtatatatttgtggttggcaagatattactgaaacgcgtgatctaattaatgcactcgaggtagaaaaaaataaagcgataaaggctaccgtagcaaaaagtcagtttctggcaacgatgagtcacgaaataagaacaccaataagctctattatgggcttcctggaacttctgagcggttctggtcttagcaaggagcaacgggtggaggcgattagtcttgcctacgccaccggacaaagtctcctcggcttaattggtgaaatccttgatgtcgacaaaattgaaagcggtaactatcaacttcaaccacaatgggtcgatatccctactttagtccagaacacttgtcactctttcggtgcgattgctgcaagcaaaagcatcgcattaagttgcagcagtacgtttcctgaacattacctggttaagatcgaccctcaggcgtttaagcaggtcttaagtaatttactgagtaatgctctcaaatttaccaccgagggggcagtaaaaattacgacctccctgggtcacattgatgacaaccacgctgttatcaaaatgacgattatggattctggaagtggattaagccaggaagaacaacaacaactgtttaaacgctacagccaaacaagtgcaggtcgtcagcaaacaggttctggtttaggcttaatgatctgcaaagaattaattaaaaatatgcagggcgatttgagtttagaaagtcatccaggcataggaacaacatttacgatcacaatcccggtagaaattagccagcaagtggcgactgtcgaggcaaaagcagaacaacccatcacactacctgaaaagttgagcatattaatcgcggatgatcatccgaccaacaggctattactcaaacgccagctaaatctattaggatatgatgttgatgaagccactgatggtgtgcaagcgctacacaaagtcagtatgcaacattatgatctgcttattactgacgttaatatgccgaatatggatggttttgagttgactcgcaaactccgtgagcaaaattcttccttacccatctgggggcttacagccaacgcacaggctaacgaacgtgaaaaagggttaagttgcggcatgaacttatgtttgttcaaaccgttgaccctggatgtactgaaaacacatttaagtcagttacaccaagttgcgcatattgcacctcagtatcgccaccttgatatcgaagccctgaaaaataatacggcgaacgatctacaactgatgcaggagattctcatgactttccagcatgaaacgcataaagatctacccgctgcgtttcaagcactagaagctggcgataacagaactttccatcagtgtattcatcgcatccacggtgcggctaacatcctgaatttgcaaaagttgattaatattagccatcagttagaaataacacctgttagtgatgacagtaagcctgaaattcttcagttgctgaactctgtaaaagaacacattgcagagctggaccaggagattgctgttttctgtcagaaaaatgactaaatagcggctcccacaatgttcaaatgtgggagctatttaccagcacatcttacatttaactactgaactcctggcgaatttgttccccatgctggtcgagcgttgccgctcccggcataacatgcgggtccgcgcagccgctgatttttatcggattacccggcatcattattcccccggcttcaatcaacatatttctcgcctgagtttgtggcaatttaatggcctcagccacacttaataacggcgcgacgggtacaccaacttcatgtattctggctaaccaaacttcagctgcctgcgtttttaacgtccgctcaatatattgtttaagaatagcctggttttgtacgcgtaaaatattgctgctaaatcggggatcattaaccagttccgtaagctccagtgcctggcataacgcagaaaaaagcttgtcattaccacaacaaatcgtaatcggcttatcctgagtattgaaaacatcaaaaggtgccatgtagggatggcgatttcccagacgttgtggactcttcccagttgcgatatatgccatcagaccatgctccagaaaactcagcgtggcatcaaacatcgctatatcgacatgcgcccctctctggctcttttcgcggccataaagtgcactcactattccgctgaataaatagacaccgccgcatagatccgcaagagatgtaccaacgcgcactggcggagcatcaggatatcctgtttccatcattatcccgctcattgcctgaatgatggtatcgtaggcaggagcatcttttagcggaccggtatgtccgaaaccactgctactagcatatatgaggcgcgggttgatttcttgaagcgtttcccaactaaaccccagtttttccattgtacctgggcgaaaattctcagctaatacatcagcttgtttgagcatatttataaatatacttttatcgtgatcattctttaaatcaagaaccacactctctttgccatgattaataaaactgtaatagagactctgtccatccacatagggaccaaatgtgcgggtatcatcaccatgacccggcggctcaactttaattacccttgcgcccatattacaaagaagttgagttccgaaaggtccattaaggacatgtgtcatatcgataactaataagccttcaaacggccctttgctttcattatttgtcatttgcttatgccttgaaaaaagccgaaggtgaaaagacacttcggcatttatgtaaaatcaataacatgattaattaactaaccagtcgactgacataaatccacaagggagccgtgacgacaaagcccagtacgctcacagccaaactcgctgtaccagtacgggtgtagacattaaaccggctggcaataatgattccggagaatgccggcggtaatgcgcctgccagtaccatcatctgcagatgttcgctgttcaaatgacatgccataccaacgagaagcagtgccagtggcatcagaatcagcttcaggaaggtgttataagcaatttcggcactgaactcgaatttatgtgcagccagagtcaaccccgcagcgaataccgctaccccactgttagccttcgcaatcagattaaaggttgggtcccatgctgccggaatttttaccccaaccaacaccaggatcgttgccagaacaggtgcccatactactggctcctttgccgcagaaattaatgcgctcagattactattcttcttaccatccgctccactagaaggattcagcaaatacagaccaataggaatagtaattgcgttaacaataatagaaataattgctaccactaaacctgtacttacggaatcaccataaataggatcgagaactgcaaaccccaggaatccaatggtaggactacctgcaattaatgcacatacagctgcttctgcatgggtacgtttaaaaaatttgtagcaaccgaaccaggagaaaaagaaacatccgacaataaccacaagacttacaagggtcagacgagtgtccgcaaaaatcatttccctgtttgcccgagtaatagatacaaatagagccgcaggaagcgcgtagtttaataccagtttattaaatgcccgagcttgatcttcactaaatgtttctcgtctgccgctaaaataacccaacagcatgattacgataataggcaataaatcgccaataaaaaatgttagcataatagtatttccgataagggtcccctcaccatcgcataatgagttggcaagaggagacgatgtcagtatttaattaccagcgacttgttttgggttaagtttggtaatatggccactttcagttcctgctgcagggtcgatgaccacattaataatggtcggtttgcggctctgaataccggtggttaaagcatgacgaagttcatctgtcgtggtgacgttatagccaacgccacgaaacgcatccattaatttgtcataccttgcatggtgcaacagatccgttggacttggtgcaccagcgccactgagatcaacaccgtctcctctgtagatgccgccattattaaaaataacgatcgtcaccggcaggttatatcgacaaatcgtttcaatttccatcccactgaaaccaaaagcactatcaccttcaatggcgacaaccggagaaccagaagtcacgctagcaccgatggcatagcccataccgatgcccatgacaccccaggtaccacaatccagacgacgacgtggtttatacatatcaataatatttcgtgcattatccagggtatttgcaccttcattaactaaataaatatcctggttctcgcgcaatacgtcgcgcacagcacttaatgcattaaagtaatttaatggttgagtatctgtacttaatttttcatgcattttttgtgcattttgctgcttgtggatatttaaaatatcgcgccataccagtggagtcgtaaatgtgttttgtttcagttctgccagcataccttgcatactggatgcaatatcaccaacgactggcacagcaatggggcggttgctgtcaatttcctgcggttcaatatccagttgaataaactgtgtatctgccgcccatccttttttaccgtgtgccaataaccaattcagtcgtgcaccaacaagcatgacaacgtcagcatttgccagggcaaagctacgcgcagctgccgcagaaagtggatgcgtatcttcaaggatccctttcgccatagacattggcaggaatggaatctgagcactttcaataaattcacgaagctgttcatcagcttgactatacgccgcgcctttgccaaggataattaatggccgttcagcttttgctaaaaggctaattgcgctagtgacactcttcgggcatggcaataatgctgggctcggattttcaactttaacaatcgtggttaacgcttcgtctttttccatcgtcgcggccaggacatttgctggcaaatcaagataaactccgccagggcgaccgcttacagagacccggatagcgcgtgccaatgcaatgccaagatcctgcggctgattaacgcgaaatgctgctttggcatacggttttgccgcattcatttggtccagctcttcataatcaccttgctgtaggtcgacgatcgcgcggtcgctggagccgctaatcatgatcatcggaaaaccatttaccgttgcgttggccaatgcggtcaaaccattgaggaatcctggcgcagaaactgtcaggcagatccccggtttttgggtaagaaaaccgcttgccgcagcggcatagcctgcgctctgctcatgacgaaaaccaatataacgaatgccttccgcctgggcatggcgtgccatatccgtcacaggaatacctacaacaccataaatagtgtcaatattattctgttttaatgcttcaacgatgatatgcataccatctgtcatttgaagttgatcactcatgattaataacctcgaaatttttataaattgggagccagaagcccccgttaatatcagatggcgtggttttgcttcattgcagcaatttcatcgtcgctataacccagctcctgcaatacagcagcggtatgttcacctaatagcggcgcagctttaatatccggcgtaaaggcagagaatttcattggacaaccaacggtcagatattttccacgcaacggttgttccacttcaacaacactgccactttggcgcaaagagggatcaagactaatttctttcatacttaaaaccggtgcacaaggaatatcaaactgagtcaaataggccaccgcttcatgtttatcaatagtgacagtgtatttttcgatttcagcaaaaatatcgaaaatatgtggctgtcgtgcatgggctgtactgtatgccggatcggtaatccattctggtttgccgatggctttacaggtgttttcccagttttgctcctgaatagtgaaataaatataggcgttaggatcggtttcccagcctttacatttcaggatccagccaggctgaccgccaccacctgcattaccaccgcggggaactgcatcaccaaatgtaccattcggatactgcgggtattcttccagataacccaatttatcgagacgctgctggtcacgtaatttcacgcggcaaaggttcaatacggcatcctgcatactcatggtgactcgttgcccacgccccgttttttcgcgatgcagcaaagcagcaagtaaaccgatcagcaaatgcattccggtgttgctgtcacccaacgctgcagcgcttaccagcggcggaccatcccaaaaacccgtagtggatgccgcgccacccgctgcctgagcaacgttttcataggcttttacattcacataagggctacactcatcaaaccctttgatgctaccaaaaatcagacgtggattgatttcttgaatatgctcccaggtgaagcccatgtgatcaatggcccctggatgaaagttctcgactaagatatcagcttcgcggatcagcttttccattacctctttgccttccgctgttttggtatttaactcaatagaacgtttgttactgttaagcatggtgaagtaaagcgcatcgatatcaggaatatctcgcagctggtgacgcgttacgtcaccaacgccgggacgttcaattttaataacgtcagcgccaaaccaggccagcatttgagtacaagatgggccagattgcacaccggtgaaatcgagaactttaattccttgaagtggagtactcatagcaatacctattagttaattaaatatgtgttaatttagcgtttatttaaggcgtaatatcttctataaataacccgcaaaatatcgtcgtagctgcactcgatatttttaaaatcctgtatcaagtgctgaaaatcatttcatcgccacttccaattcctttctgcatggtaagtagtgaggacgaaaagaagaatatgataaatattgattcgtggtaatcagagagagtcgcgacatttgtgatgttattcttacaactgtaagaagcgccggtgatttacaagcaagggtatgattacgctttttaaagcgtaccataaaacataacataataaatgatttgtgatgacacgggattattgcggtttactttgaggaatataaaatgcgagtttatagcaccgcgagcgccaaataattttatgaccacaacctgtcgtattgtggtcataaaaaattgtcggctggagggagttaaatcctttacctcaatatactgcctgtcagcattagttcacaaacagtgcttcgctatcgacgatgattccatcttccgcacctttaagcgccaggtttgcctcgtagtattgctttttatcaagcagtttctgcgcatcagcaagtgcattacgagtctgtttaagtggcatcagatattggttttccattacgccaacaccggccaggcgaagctcttccattgcgccctttttatcccctttcgccattttttcattggcaatttttatcgcggcttctttttcgggagttgctacataactctcagaaattccgacagatgcattaatgacaatatattggtcatcattgagattggtctttttacctggcttagcgaactttgcccattcggtactgtcatcactcagcaaagcggaagcttcattggtcagttcttttgccttttctggatcgccatgaaacagagccaggcgcgctacctgcacgtcacgcatcgcatataaaccttgttcagagatacgctctgctgccgctgccgttttctgggtttgctgaacttgctgagtttgctgttgtgccgctaccggagcattatcagcagcccatacagtactagatgccagaattgctgtgaccatcgtggccataattaaacgtttcatacttacctcattctttaacagttttagaaaacgccgccatcatattgggtgagcatgaaatgagaaatcagagagcaacggtcattttgaaagggttatcttacagttgtagttattatcgcaagaagtattttagtcttacaattgtaggaatatgcttcctgtcgcagagaactattcttatataccacaaagagatgtcatttattatatcgatgtaaatactgattaattaaatgtaaatacagccataacatcgtaggttctcagtgaaccattttcaggataactttctatgaaagtaaacttaatacttttcagcttatttttattggtctctattatggcatgcaatgtttttgcattttccattagcggtggtggaagtgagaggagctataaagagactgaaaaaacaagtgcgatgacgaccacacactctacaaaacttcagccaagtcaggcgattttgtttaagatgagagaagatgcgccaccattaaacctcacagaagaaatgccgcccccttttccgacaaaggcgaattatcttattcatcctgtgcgataacgtctttcacatggcaggtgaacaatcatgtctgatgctgatgtgaacacctgcccaaatgagccatcctgacccattaccgcctgccataccccaccataaagcgaatcatcaagccacaagccggggcaagaaacataaatatccccgtcactagttcattaccgccagttaaccacatggtgaagtaataaatgagtgcagcgaggatcaccatgccgaagaaagaagagaccgcgcttaccacgttcagtacctgaccgatgtagccgcttacgcagacaatacacagggcgagaaacatccataaattaatcatagctcaacctcctgccgcgctaaaaaacctgtaacttcagtcactttaatagtaagacaatccttaacctctggcaatttttgctaagcatcaatgaaaacagcatgttaaatgcaagactgttgtgtacggaaaaatatttactttgcacgattaataatcagtagctgaaagcagtcagcgagtgataaagtacagataccgcattcatgctcctcgtggttatgtcctgactagtctttacactctttacaggaaccattgtcgtacatgatggcccaaccaattgagtgtaccgctgtcgacatggaatcttctgcgatacaacaattcgtatctacagaaggtaactatgtttccacaatgcaaattttcccgcgagtttctacatcctcgctactggctcacatggtttgggcttggtgtactctggctttgggtacagcttccttatcctgttctctgctttctcggcacgcgtattggcgcaatggcgcgaccattcctgaaacgtcgtgaatctatcgcccgtaaaaacctggaactttgtttcccgcagcattctgcggaagaacgcgagaagatgattgccgaaaactttcgtagtctcggcatggcgctggtagaaaccggcatggcatggttctggcccgacagtcgcgtacgtaaatggtttgatgttgaagggttggataaccttaaacgcgcacaaatgcaaaatcgcggcgtaatggttgtcggcgtccattttatgagcctggaactgggcggccgcgtgatgggactgtgccaaccaatgatggctacctatcgtccacataataatcagctgatggaatgggtgcagacccgtgggcgcatgcgctctaacaaagcgatgatcggcagaaataatctgcgcggcattgtcggtgcactgaagaaaggtgaagcggtatggtttgctcccgatcaggattatggtcgtaaaggcagctccttcgcgccgttctttgcggtggaaaatgtcgccacaaccaatggcacctatgttctctcccgtctctctggcgcagccatgttgaccgtaacgatggtaagaaaagcggattacagcggatatcgtttgttcatcaccccagagatggaaggctacccgacagatgaaaatcaagccgctgcctatatgaacaagattatcgagaaagagatcatgcgcgcaccggagcagtacctctggatccaccgtcgctttaaaacgcgcccggtgggagaaagcagcttgtacatttaacaaactgctcttactctttccctcctcaaatcggccataataacctcatggtttttatggcttttttcttaaggttttttccttcgctgaatatctaattattaccgtcagaaattaaactgtcgccgatatgagacacttgtaagttactaaaagtaaataagaaaatgcctcttgtctcgtttcagttttaggcgtacattagcgccgtctcgagcagtttagctcagaattctggggtgatgcccacggtaaaatacagggcttttaaggtcgctttgcccggtgtcaactcactgtatcaggtgtaatgaagtcattcaggcgtaacagtaattacgcggagagatgtaaagtgaaatatttctttatgggcatttcttttatggtcatcgtttgggccggtacttttgccctgatgatctaaaagcaaactgtgcaatgaaaaacaggagccatcaggctcctgtttgcatttctgacgacggtgtttattccgcgttttcgtgaatatgtttgctgctggcgggtagtaaaccgtcggcacggaacatcgctttaatccctctgatggcctgacgaatacggtcgcggttttcaatcagtgcaaagcgaacatgcgtatcaccatagtcgccaaagccaatccccgggctgacacaaaccttcgcttcgttaaggagcttcttggcaaattccaggcttcccatggccgcatatggttccgggattttcgcccagacatacatgctagccttcggcatttcaaccatccagcccgcttcatgcagccctttaaccaatacatcacggcggcgtttgtactgttcggcaatgtcgcgcacgcactgttgatcgccctccagcgccgcaatcgccgccacctgcaacggcgtaaaggtgccgtaatcgtgatagcttttaatacgagccagggcgctgaccagcgttttgttgccaaccataaagccgatacgccagcccgccatgttgtagcttttgctcagcgtaaagaactcgactgccacatcgcgtgcacccggtacctgcataatactcggcgctttccagccatcgtagacgatatcggcataggccaggtcatggaccaccagcacatcgtagcgtttcgccagcgccactactttttcgaagaactccagttccacgcattgcgcggttgggttactcgggaagccgaggatcatcatcttcggtttcggataactttcacgaatggctcgctccagttcgttgaagaaatcgacaccttccaccagcggcacactgcgtacctgcgccccggcaatcaccgcgccataaatatggatcgggtaacttggattcggcaccagcaccgtgtcaccatgatccagcgtcgccagcatcagatgcgccaggccctctttgctaccaatagtgacgatggcttcactttccgggtcgatttcaacgtcgtagcgatcctgataccagcgggaaatggcgcgacgtaaccgcggaatgccgcgactagtggagtaaccatgcgtgtccgggcgctgggccacagtacataatttttcgacgatatgcggcggagtcgcaccgtccgggttacccatgctgaaatcgataatatcttcgccgcgccgacgcgcagccattttcagttcagcggtgatgttaaaaacgtagggcgggagacgatcaatgcgcgtaaagcgacgttcagggcgagtgtcagccataatttcctcagattaacgttagcgcccggaccgtccgagcgacgctgccacgatggtggctgttttgaaaatagcctgattaatttctgtctgtccagtgttttagaacattttattaatgacgttaaatgaggaactctgctttaaaaacaggaaatttatctgcgctaacaagaaaattaccactcattttattaacataataatttcaataaatttactaaccagaagtgcattatcaagagatgcattgctaatacaccatttatctatcaatccccttttaaaattgtggtttttcctcaaaaacggcctgctggtcatcagccttcaggttacctatcatagaggtttaatccttattcagagtcacccgtgcacgaaatattcaacatgctgctggcggtcttcgatcgggcagcgttaatgcttatctgcctgttctttctcatccgtatccgcctgtttcgcgaactgttgcacaagagcgcgcactccccaaaagaattgctcgccgttaccgccattttcagcctgttcgccctgttcagcacctggtccggcgttcccgtagaaggcagcctggtgaacgtacgtattatcgcggtgatgtccggcgggattctgtttggcccgtgggtaggcatcattaccggcgtgattgcgggtattcaccggtatttaattgatatcggcggcgtgacggcgatcccctgctttatcaccagcattctggcgggttgtataagcggctggatcaacctgaaaatccccaaagcacagcgctggcgcgtcggtattctcggcggcatgttgtgtgagacgttgaccatgattctggtaattgtctgggcaccaactaccgcgttggggatcgatatcgtctctaaaatcggcattccaatgatcctcggtagcgtctgtatcggctttattgtgcttctggtgcaaagcgttgagggcgaaaaagaggccagcgccgcgcggcaggccaagctggcgctggatatcgccaacaaaacgctaccgctgtttcgccatgtcaatagcgagagtttacgcaaggtctgcgaaattatccgcgatgacattcacgccgatgcggtggcgattactaataccgatcatgtgctggcctatgttggcgtgggtgaacataactatcagaatggcgatgacttcattagcccgactacccgtcaggcgatgaattacggaaaaatcatcattaaaaacaatgatgaagcccaccgcacaccagagattcattccatgctggtgatcccattgtgggagaaaggggtcgtgaccggaacgctgaaaatttactactgccacgcgcatcagatcaccagcagtttacaggaaatggcggtcggtctgagccaaatcatctccacgcaactggaggttagtcgcgccgagcagctacgtgaaatggcaaataaggcagagcttcgcgccctgcaaagcaaaattaatccccattttctgtttaacgctctgaacgctattagtagcagtatccgtctgaatccggataccgctcgccagttgatctttaatctgagccgttatctgcgctataacattgaattaaaagacgatgagcaaatcgatatcaaaaaagagctgtatcaaattaaagactatattgccattgagcaggcccgctttggtgacaagctgacggttatctatgatattgatgaagaggtgaattgctgcattcccagcctgctgatccagccgttggtggagaacgccattgtccacggtattcagccttgcaaaggtaaaggcgttgtcaccatcagcgttgcagagtgcggaaatcgggtacgcattgcggtgcgagataccgggcacggcatcgatccaaaggtgattgagcgggtcgaagcgaatgaaatgccgggcaataaaattggcctgctgaatgtccatcatcgcgtgaagttattgtatggcgaggggctgcatatccgccgcctggagccggggacggaaattgcgttttacattcctaaccaacgcaccccagtcgccagtcaggctacgttattgctttgagccggagtgatattgtgaaagtcatcattgttgaagacgaattcctggcacaacaggaactgagctggctaattaaagagcacagccagatggagattgtcggcacctttgacgacggtctggacgtgttgaagtttttgcagcataaccgcgtcgacgccatttttctggatatcaatattccgagcctggatggcgtgttgctggcgcaaaacatcagccagttcgcccataaaccgtttattgtgttcatcaccgcgtggaaagaacatgcggtagaagcgtttgaactggaggcgtttgactacattctcaaaccgtatcaggagagtcgtattaccgggatgctgcaaaaactggaagcggcctggcaacaacagcagaccagcagtacgcctgccgcgacggtaacgcgtgagaatgacaccattaatctggtgaaagatgagcgaataatcgtcacgccaattaacgatatctattacgccgaagcgcacgagaaaatgacctttgtctatacgcggcgtgaatcctacgtaatgccgatgaacattaccgaattttgcagcaaactgccgccgagccattttttccgctgccatcgcagtttttgtgtcaatctgaacaaaatacgcgaaatcgaaccgtggtttaataacacctacattctgcgactgaaagatctggattttgaagtgccggtcagccgcagcaaagtgaaagaatttcgccagttaatgcatctttaatcgggaactttcatgaaagcaccaggcttgcccgccgatcaacaatttttcgccgatctgttcagcggcctggtgcttaacccgcaactactggggcgcgtctggtttgccagccagcctgccagcttgccggtgggcagtttatgtattgattttccccgtctggatatcgtgctgcgcggcgaatacggcaatctgctggaagcaaagcagcaacgtttggtggaaggagaaatgctgtttattccggcgcgcgcggctaatttaccggtcaacaacaaaccggtgatgctgttaagcctggtgttcgctccgacctggcttgggttaagcttttacgatagccgcaccacgagcttgttgcatcctgctcgccagatccagcttcccagcctgcaacgcggtgaaggtgaagcgatgcttaccgccctcacccatcttagccgtagcccgctggagcaaaatatcattcagccgctggtgttaagtttgctgcatctttgccgtagcgtggtgaatatgccgccgggcaatagccagccgcgcggcgattttctctatcacagcatttgtaactgggttcaggataattatgcccagccgctcacccgcgagagcgtggcgcagttttttaatatcacgcccaatcatctgagtaaactgtttgctcagcatggaacgatgcgttttatcgagtatgtgcgttgggtgcgaatggcgaaggcgaggatgattttgcagaaatatcatctgagtattcatgaagtggcacagcgttgcggttttccggatagcgactatttttgtcgcgttttccggcgtcagtttggtctgacgccgggagagtacagcgcccgttttcagggctaacgtcagaaggttaattctgtttccagcagcgtcaggatactttgtgcatcttgcgcggcaaacaagctctggcggaagtttttattcaccagtttacgcgccagctggctgaagactttcacatgattcatcccttcgttagcacccagcgtcagcatgatcaccagttcgacttcgcccatttcactctgccagccaatcggtttcgccagccgggcaatgctgatactggaatgacggatccactgagatttggtgtgcgggatcgctacgccaaaaccaacgccggtggtaacaatctcttcccgctgccagacatcttcttccagctcaaacggatgttcagtgcgcccgttaacgccgaggttgccgcacaggaactggatcgcctgctctttattgctaaaatcctgatcaacaaagatattctccagcgccagcagtgggcgaacgtcttcttccggcgtaaaggcggtgagtaacgcttcaatttcctgcgcactgcggcattcacatgcctgacgcgccagttcccgacacgcctcgctatccagttgacgaagctggcttttcaccgccggaatacgcgggctactcatactcagctcatccaggcccagcccaagcagtagcggcagataacggctttcaccgcccagttcaccgcaaatgcctacccatttgccccgctgatgcgcagtggtaactatttgctgcaacatgcgcaggaagcttggcgtaatcgggttatatagcgggcttacgcgcgggttattacgatcgaccgcatacagatactgggtcatatcgttggagccgatactgaagaaatcgacctcatcgcagaagtggtcgatgatgtagcacacgctcggaacttccaccatgatcccaagcgtaatcgtctctgcatgacgcaggccatcgcgcttaagctcaacgatcgctttttggatctcgcctttcacccataagatctgatcgaggctgtgaaccatcgggatcatcaactgggcgttgccgaaactggcggcgcgcaaaatggcccgcagttgagtgcggaacaggccagcaaattccgggtaaatacgtaccgcgcgatagccgaggaacgggttctcttcctggggaatattcagataaggaatgcttttatcgccgccgatgtccatcgtgcggaagataatcggcttgtcgcccgccgccagtagcacctgctggtaggcttcaaattgctcctgctcgtccggcgcgctgtcgcgatccatatagagcatttcggtacggaacagcccgacaccttccgcgccgttggcaaacgcgcctggcgcttccagagcggtgccgatattcgccgcaatatcaatacgcttgttatcacgggaataggccagctgcgcggcagcctgcgcctgttgtttttggcgtttatccgccagcgtctgcgcgacctgataataaccgctcaccgcgtcattcgggttaatcgccagcacgccgcactgggcgtcaagcactgcaggttgcccggcataacgggcaatcgcatccagcggcaagccactcagtaccgggatcgcgctggcacgggccagaatcagtgtatggctggtgcgcccggttttctccagaatcatgcccgcaagatttttcaaatcaaggctcaaaaactggcttggggttaaatcttcagccaccagaatggtcggtttttcaagcaccagcttgttgcgcggcttcagttccggccaggtgatatgcagcaactgttcgctgatatcgcgaatgtcgctaacacgttcgcgcagataatcgctggcagaggcagaaagtttggcgcaaacctgctccatattgctgatgatcgccgcccccagcccctgatgctgttctgtcatcaggcgacggatattgcctgcaaattcatcatcctgaatcaggctcaaatgggcgctgaggatagttttgctttcgccgtcacgctcacgcaattgctggttcagttgctcggcaagcgttgccaggctgtgctccagccgggtggaatcttgcgcactggcggggattgcccgataactgtcgaggctgtcgctttgtaacagggtcagcgtacccacgccgacgccgcttgccagcacattgccgtacagtaaatccgggttaaggcggcttaaactacgcggcagcggatgcgccgtcagttctgcctgcgtaggctgaacgctgtcgctgtcgataaagcgcacctggatgtactcttccagcacgcgccgcgcctgctcttcatcgctgccgctaatgttcaggctgcaactgtcattaaatagggtgccggtgccaatcagcgccaggctgcttttcgcatctgcctttgcgttctggcgatggttaataaaagtgatttcgctttgccactggctgcactgttctttaagttcccacgccggacgagcatgtagaccgttaggcaaaggacagagaaattgaatcgttaacataaccgctccgggttaatcaggagatcatctgaaatccgtcagttgaacaaccgtctcacgcgtaagacgttgaataagggcagataaaagttgctgcatctgcaaaatgtcgcggcaatcggcaatgcttgcggcgcaatgtccatggcgggttgctggccccatcaccactgtgggcacgccggtgccggttaagtgcaccgccccgccgtccgtgccgccgttgctgaacatatctgcctgcaacggcacgccaatttctgccgccacggtttcgacccaggcggtaagttttggcggcgcaatcaggctcttgtcgcttaacaccagcatcggcccgttaccaatctggcgatggttagccgcgccataatcaaagtttttcgcccagcaggcggtatcaagcacaatggcgacgtccgggctcaccgcgcgggtggcagtttgcccgccgcgtaatcccacctcttcgctggaacttgccaccagccacacttccgcaggtagttcggcgtcgtgcagttcgcgcagtaacgtcaccagcagatagcaaccgaggcggtcatcaaaggctttccccatcactcgctggtgagggagaacctgaaaagtggtatcaaacgtgacgcgatcgccgggacgaattcccgcctgcatcacttcgtcataggagcgcgcaccaatgtccacgcgcatggcgctgacgtcattcccctgccggtcgccgtcaagcaggcctggaattttgcactcttcacgggtggtgatgcgcaccggctgcagctggcgggcagccatgcgtacgttgccaaccggcagcacatcaatcgccccttcgcgggagatgctgcgcaccataaatcccacttcgtccatatgcgcacagatcatcaccttcggacctgtgctttcattcaggcggatcagcacgcttcccagaccatcaaatcgcacttctttttgcaggcgatccgcttcttccagcaggatctgccgcacttcctgttcgctggaggcgatcgcatctgcctcgctcaacgcttttaataggcttaaatccattatgcctctcccgtgagcaacactgttttcggcatggcgtagagcacttctgcgccttgcggggtaaccagcacaacatcttcgatgcgcacgcccccttgccctggcaaataaatccccggctccacggtcagtaacatgcctggctgtagcgtcgtggtgtcccgcggactaaaacgcggatcttcatgaacttcaatgccgatagcgtgaccggtgttatgaccgaaatagtcgccataacctgcttctgtaatgacccggcgcgcggcatcgtcaacctgctggcagcgcacgccggggcgaatcgcggagattgctgcgagctgtgcctgcaggacaatttgatagacgttaaacagcaggtgagattcggcgctcaccccttcgccattcaccagcaaggtgcgcgtcatatcagagcagtagccctgatacagcgcaccgaaatcgagagtgacaaactcgcccgctgcaacaatcttgtcgctggctttgccgtgcggcagcgccccacgccagccactggcgacaatggtgtcaaaagaggctttttctgcgccctgctggcgcataaaccactccagttcagcggctatctcgcgctcgctcatccccgcctgaataaagcggcgaatatgctctgcaccgcgatcagcaatcccacaggcgaggcggattttctccacctcctctggcgttttgatttgccgcagcacatccggcgtggcgctaaccagtttcgcattgagttcagactgccagcggtgcgcggtttcccaactcacctgctggccctcaaaaccgagcgtttgcaactgttcatcggcaatgatttgattgacgatagtggtaagcgtgttcgtcgcgtcaagcaaatgcagctggtagccttgcgcacgggcttccacctcaacgtaatagcggctatccaccagaatgtgcgcactttcacggctaatcaccacataaccacttccggtggagatccccagatgcggctgtttgttctgccgactggagagaagcactgcatccagttgttgcgccttaagccagtcgcgcaggctagcgagtaatgtcatctggattttccttcttacaggctatcgattaacaatttgcctttacggaacatcatcagacgcaggaacaccaccatcagcgcagttatgactgcccccagcgcgatccccgccatatagacgcccaggttagtgaccagcggccatgcccagatagcggactccgggaaccattgcactgcgcccagccagacagcggcggtactgccgacaatagcgccgaccatatagctcggaatggcggtgatggggctttccagcgcaaacggaatcgcaccctcactgatccccataaacgccaggaacatggcggtcttaccctgcggataaagttgagcgttgaacaggcgtttgccggttaaacgacggtcgataatggtcgccagccccagaccaatcggcggaataacgatagcgatagaacgagcggtgaccggtaatacgtggtcagtggtaaagctgaaggcaacaaaacctgcggctttgttgatcgggccaccaaggtcgattgctgtcgccgcggcgatccccattgcgtacatcagcgcgcccttctcacctgcggcagtcagcacagtacggataccgccgttgatccagccaccaaagggggtgatgacgtagtacatcgccagcatgacaaaaatggcggaaagaatcgggagcaaaaatgtggttttgaacgctaacaggaaatccggtaactggattttctggttcatccacttcacaaggtaaccggcaacgatagaaataatcagcgcaccaatgaaggtggacggcaccgggctagaggtcgcccattgcatagtgctgggatcgaagttcagcagttgcgtcggctgggtagacatcaacccgccgataaaaccagccgggaacgccagtttgccaccgatagagttcgccacaaaagcagcaaacatcggaatggcaaaaccaaacaacacgccgccgaaggactggctcagccaggcaaatttaagtaaggagaggtcgaaaccggagaatttcccgctattaagagcatccatgatgccgatctcagcaggaattttaagccagctataagcaatcagctggctgaaagcgaggatcacaccgcccataattaaggtcggcaccatgcgactaatcccactcatcacatgctgcgggagttcaccccagaagctggttttagaggcctgcggattcttaactgccgctgccgcaccggatgcgccaggcacaacggttgcactgcgttttttaatggccataacaattatccctgtcgaatattactgttgttcagaggcaatcatctcttcgatttctttgatgatgcccgcagcgtttttaattgcgtcctgcaaagtgatttcataaacgtcgcgactttcgaaacgttcgttatcttccggggtaactgccacggagtggatgatgatggtcgcttcggcgatatcctgcgccgtcaggcgattctggataccgtccgcgccctgggtttcaattttcacttcataaccggcttctaccgccgcttcttccagcgcctgagcggccataaaggtgtgagccaggcccatcgggcaggcacataaggcaatcagtttcttactcatcgttaattcctcgttcagtgatagttgacgagtgaaattatgaacgtgcaaaacaaatcgccgttaccagacaaataatgcatttactggagaattaatcccgctgtacggaagtgtgacgcaggtcgaccttgtgaggggacacaaagaaaaattgaataaactgtatgatttaaaagattatcgggagagttacctcccgatataaaaggaaggatttacagaatgtgacctaaggtctggcgtaaatgtgcaccggaaccgagaaggcccggattgtcatggacgatgagatacaccggaatatcatggacatattctttaaagcgccctttatcttcaaatgcggcacggaaaccggaggctttgaagaactcaaggaagcgcggcacgataccgcccgcaataaacacgccgccaaatgtcccgagattgagcgccagattgccgccaaaacggcccataatgacgcaaaacaggctcaatgcgcggcggcaatcggtgcagctgtcagccagcgcgcgttcggtaatatcttttggcttgagattttctggcaggcggttgtcagctttcacaattgcgcgatacaaattcaccagcccagggccagaaagcacgcgctccgcgctaacatgaccaatttccgcacgcaatatttcgaggataatggcctcttcttcactattcggcgcaaaatcaacgtgaccgccttcgcctggcaagcttacccaacgcttatcgacatggaccagatgcgcaaccccaagccccgttccggcaccgtaaaccgcaataggcttaccttcgaccggttctgcgccaccaaactgaatcagatgctcttttttcagcatcgggatcgccatgcttacagcggtaaaatcgttaataatttccagatggctaaaaccgagattctttttcatttcggcaatactgaacgcccaggtatggttggtcatcgccacccagtcaccggtaattgggcaagcgatggcaatacagccgtctttcacctcgaccttatgttcttcaagataaacgcgaatgaccgcttcgaggctggggtaatcaagcccactataggtcttagcctggctgatttcaccactggcaatatcacacagagcaagacgtgcgttggtgccgcccacatcaccgactaatgcatactttgtcattcttcaactgctccgctaaagtcaaaataattctttctcacactgtaaatacctgggggcataacaacaacgccggaaaggcaggctccctgtaaatatcgatctgggtcacacaattactttatcgtttcagcaccaattgcagcgatgcctttttgcaagctgggcaaactaagtatctgaccccgcataaggaatagaacacaggcggcactaacccggacgtagactgtattacaaaagcggcaaaaagcagagacaaaaaacccccgctttgcagcgagggttggaaatttggtggagctaagcgggatcgaaccgctgacctcttgcatgccatgcaagcgctctcccagctgagctatagccccacgatgcgtttacgtaccaagtttgctgggtgcaaaatttggtggagctaagcgggatcgaaccgctgacctcttgcatgccatgcaagcgctctcccagctgagctatagccccgtcacgtaaagcttgtcgagttgacgggcggcatcatatgaattccgcccgaatgtgtcaacggcaaattgcaacgtgtagtttcaatcgctgaaaaatcaggcaaatgaacaattttggaaaaccgctcgcattcagtagttattcatgtcacggtttcctgtaaagtggtgttataaaatgaactactaatagacccacatacattcagggaattgttatgttcaaggagaggatgacaccagatgaacttgccagactgaccggctatagccgccagaccattaataaatgggtacgcaaggaaggctggacaacgagtccaaaacctggcgtccagggtggcaaagcccgactggttcacgtcaatgaacaggttcgtgaatatattcgcaatgctgaacgtccagaaggtcagggagaagcgcctgccctttctggtgatgcgccgcttgaagtattgctggtgacactggcgaaagagatgacgccagttgaacaaaaacagtttacatccttgcttctgcgggaagggattatcggattgttacaacgcttagggattcgcgatagcaaataatatgaaaagattacgcaataaaatgaccaccgaagaactggctgaatgcctcggtgtggctaaacaaactgttaaccgttggatcagagaaaaaggctggaaaacggaaaaatttcccggcgtgaaaggcggtcgtgccagacttattctggtcgatacgcaagtttgcgagtttattcagaacacgccagccttccataacacaccaatgttgatggaagctgaagagagaattgctgaatacgctcctggagcacgcgccccggcgtatcgacaaatcatcaacgcgatagataatatgacagacattgagcaggaaaaagtcgcgcaatttttgagtcgtgaaggaattcgcaatttcctcgcccgtctcgatattgacgaaagtgcataaataaaaaacggcaggatattatctcctgccgtttatctttttacacgctaattactgctgattttcgcgttcagcaataaaatccagcgctttgttgatacgctcgatactgcgggtcttaccaattgcgtgaacggtaacatccagtgctggagactgccccgcaccggttacggcgacacgcagcggcataccaactttacccatacccacttccagctcatccgccgtcgcctgaatagcgtgatgaacgttttcagcggtccagtcagtaatcgcggccagtttgtcacgaaccacttccagcggctgacgcgctaccggacgcagatgttttttcgcggcgtcggcatcgaactcagcaaaatcttcgtagaaataacggcagctctgtgccatctctttcagcgtcttgcagcgttcgcccagcagtttcaccagatcagccagctgcgggccgttacgggtatcgatattttcctgctcaatgtgccactgtaagtgagtagcaacatactccggcggcagcgcgttaatgtagtgatggttcagccacagcagcttgtcggtgttgaacgcactggcagatttgctgacggcattcaaagtgaagtatttgatcatctcttcacgagtgaagatttcctgatcgccgtgggaccagcccagacgcaccagatagttcagcagtgcttctggcaaataaccgtcatcacgatactgcattacgctgactgccccgtgacgtttggacagttttttaccgtcatcgccattgatcatagaaacgtgcgcgtaaaccggcaccggcgctttcagggccttaagaatgttgatctggcgtggcgtgttgttgatatggtcttcgccacggataacgtgggtgatttccatatcccagtcatcgacaaccacacagaagttataggttggggaaccatcggtacggcggataataagatcgtccagttcctggttgctgaactcgatcggaccacggatctgatcgtcaaaaacaacagaaccttcctgcgggttagcaaaacgtacaacacacggttcatcatcagcatgatgctcatggctgtggcggcagcgaccgtcataacgcggcttctcacctttcgccatttgctcttcgcgcagcgcttccaggcgctctttagagcaatagcatttataagcagtgccctcttccagcatctgatcgatcaccgcgttgtagcgatcaaaacgtttggtctggtagtacggaccttcatcccactccaggctcagccagttcatgccatccataatggcttcgatagcttccggcgtggaacgctcaagatcggtgtcttcaatacgcagcacgaactcaccgccgtggttacgtgcaaaaagccaggagtaaagagcagtacgcgcgccgccaacgtgcagatagcctgttgggcttggcgcgaagcgagttttgattttcatgaaatggccttacgtttagaaagatgccgacaaccggcaaatcctggaaaaattaagtgggcgatattctatcactcccgcctgattcctcaatgtagttcgggtttctaccttacgcattattgttttcgttgacaaattgcgcaacacggtctgttttgcgatcatcttgcttaaatttacgacgaacgaacaatttctttagaaaatgcgttgactcattttgaactctccctataatgcgactccacacagcgggggtgattagctcagctgggagagcacctcccttacaaggagggggtcggcggttcgatcccgtcatcacccaccaactactttatgtagtctccgccgtgtagcaagaaattgagaagtgggtgattagctcagctgggagagcacctcccttacaaggagggggtcggcggttcgatcccgtcatcacccaccactttctcgccagctaaatttcttgtaaaaatgtgaagtaccgaagtgggtgattagctcagctgggagagcacctcccttacaaggagggggtcggcggttcgatcccgtcatcacccaccacttcgggtcgttagctcagttggtagagcagttgacttttaatcaattggtcgcaggttcgaatcctgcacgacccaccaatgtaaaaaagcgccctaaaggcgcttttttactatctgcgatactcaaagattcgaacctgcagcaggtttgagttgagcgcagcgaaacaacggagccgctcgtgctggcgacggcccgaagggcgagcgaagcgagtcatcctgcacgacccaccaatgtaaaaaagcgccctaaaggcgcttttttgctatctgcgatttgcgaaattgcctgatgcgcttcacttagcagactactatttccggcaattcctgtctcctcacttactgtgtcaatgcagccaacagcttaaccatcgcgggcgtcacctgctgtgtttcataaacaatatataaatctgcagggatgcgctgtttgagcggacggaaaatgacacctggccagttcatttgtgcgtagctgtccgctatcaatgtgataccaatgcccatactgaccatagcgagtaccgtttgcggttcattaacttcgcgaataacaaccggactaaatcccacctgctggcaaactcgctgcaaaaaatcccagtcagtgtaaacgggcggcattgtaacaaaatactcgtcacgtagcgcttccagcgggacggtggaaaaactactgagatgatgctcttcaggcatcgccaccagaaacgcgctttcatgcaaccgtaagctggtaaaaccagtcggtggttctgtcgccattcgccagatcccggcatcaagttcgcggcgttccagcaaggccatttgcatcgcgggcatcttttcgcgaaaaagaacgtcaacgttaggattttccctgaggaatcgccgcataaccgggcgcatccgtccccacattgccgttcccactacgccgagttcaatccgccctgcttctccccgacctatttgttcaatccgagccaatacattattagcattcaccagcaatcgacggctttcttccatcaagattttgcccgcgtgtgtcagtacgacgctgcggctatggcgaataaaaagctgcgtgccgagttgattttccagctctttaatatgaatgctgagcggaggctgagacatatttaaacgcgctgctgcgcggccaaaatgcaactcttccgctacggcaagaaaataacggagcaacttaagatctgttctgtatacgcgttccataattaagtgctccatataataaatacatcgtattaaattatcatggcataaagtatttcaccaccagatatccgacatacataaacacaatggataatatacccggtaatacatttggtacaggaataggcaagcgcacgattgtaaacaaagcaccaataccaaaaccaacgccggaagaaaataaaatatctttcactaattaacctttatcataaaagcagctctgaagagcagagccgcgaatccttttaatgagtcaccgctcgatgctttatcttttcagggtcatgattatatttaaacccaaagaaaaatatcactgcgagaaaaagagcatatcctgcaaacaccagccagatagtttgccagtcttttacgccatccacgctaaagtaatctactgccatgccactcagaatgctgccaacccatgcgccgacaccatttaccatggtcataaagagcccctgcgcgctggcacgaatgctggaatcaacttcctgttcgacaaatacgctaccagaaatattgaagaaatcgaatgcacagccataaacaatcatgctcagcagcagcaaaataaatccggttgtactcggatcgccataggcgaagaagccaaagcgcagcgtccaggccaccatactcatcagcatgacggttttaatgccaaatcgctttaaaaagaatgggatagtcagtataaagcccacttctgccatctgactaacactcagtaaaatggagggatatttcaccacaaaactgtcagcaaactccgggttacgggcgaaatcatgtaggaacggattaccaaaaacgttggtaatttgcagtaccgcacccagcatcatggcaaagaggaaaaagatggccatgcgtggatttttaaacagcacgaaggcatccagacccagcttgctggcaaggcttgtggtcgcttttttctccgcaaccggaatcttcggcaaagtcagcgcataagcgctcagcagcaaactcgcaccggacgcgatatacagctgcagactactcaattccagatgcagcaggcttactgcccacatcgcgacaatgaaccccaccgtaccaaaaacgcgaatgggcgggaaagcggtcaccgggtcaagccctgcctgggcaagacaggaataagagacgctgttgcttaacgcaatagtcggcataaacgccatcgcattgactaacatcacccaaaacatcatatccggatcagttacggatgccgcataaaaaagtacgcccgcacacaccaggtgacacagcatgtatgcacgttctgcgcgcagccatttgtctgcgatgatccccattataccaggcataataatcgcggcgatccctttggaactgtaaaccatgccaacattagcgccggtgaaatgaagagtattaatcatgtaagagccgagggtaaccagccagctcccccagataaaatattgcaaaaaggacattacctttaagcgcatcgcgatgctcataatcgtttccttgtcgcatcatttggcctcacccgcgaggccgtttcttattgtttttctcaggcaattttgcgcagaaagccacaaataaggttgatgaagttctgcttagagagctccgcagccgccagcgtttgcgcatgactcaatttcacatcgcttaaaccttccgccatattggtaatcgcagagaccgcaacgactttaaggtcgcaatggcgagcactaataacctcaggcaccacagacataccaacaacatccccaccaataatttgcatcatgcgaatttccgccgcagtctcgaaattcggccccggatagctgacgaacacgccctccgtcagagggaaaccctcttctttcgccactttttgtaacagtgcgcggtattccgcatcgtaggcatttgccagactgaagaagcgctctccaaaacgatcatcgttaagacccaccatcggcgtaccgggcatggtgttgatatgatctttcaatgcgaccaggctgcctgcccccacttccggacgcaggctgcctgccgcattggtgcagaacagtagctcgcagcccagcagcttaaaggtacgaattgcgtcagtcataatggtcattccacgaccttcgtagaaatgtccgcgacctttcatacataccaccggtacgccctggagatggcccagcactaactcccccgcatgaccatgtaccgtacttaccgggaagcccggcagcttttcgtaggaaattgcgacagcgttctcaatctgatcggccagcgcgccgagcccggaacctaaaataaaggccactcgtggcgtgaaatcaggtttataagtcttgataatatctatgcaaaacagcgggttatgagaaaattgaacctgagacatacatatcctttttctgtagggtggaatctaacgcctttttatagcgaggttgtcccggctcttaccaatacacttttctcacgcattcaatagcgattcgatatcgatggatttatatcttttctctattaatccacggtaaaaactgtattggcgatattaattcctttgcattaacaatatgtcgtttttagcaaaccactttattaagcaatctactaataacgatcggcatagggaattatgctatgaaaaaacatcttttaactctgacactttcctctatattagcgatacctgttgtatctcatgcagaatttaaaggcggttttgcagatatcggcgtgcattatctggactggaccagccggactaccgaaaaaagcagcaccaaaagtcacaaagatgattttggttatcttgaatttgaaggtggcgctaactttagttggggagaaatgtacgggttcttcgactgggaaaacttctataacggtcgccataataaaccaggtagcgagcagcgttatacctttaaaaataccaaccgtatttacctgggtgacaccggatttaatctctacttgcatgcgtatggcacctacggttctgcgaatcgcgtgaatttccacgacgatatgttcctgtacggtatcggctacaatttcaccggcagcggttggtggttcaaaccgttctttgctaagcgttatacagatcaaacctattacactggcgacaacggctatgtcgccggctgggttgcaggttacaactttatgctgggcagcgagaaattcactcttaccaactggaacgagtacgagtttgaccgtgacgctacctatgcagcgggtaatggcggtaaagaagggctgaatggcgcagttgcactgtggtggaatgcaacaagtcacattactacggggattcagtatcgatatgcggatgacaaactgggcgaagatttttaccaggatgcgataatctactccatcaaatttaacttctgattgattactgccggggctcccggcagtatgaattcactttatatctgatacaacggatccccttcccgcccagccattagcgcattgccctggtctcgtaccacgtcccataaagcttcagcggcggtggaaagactacggttcttcctgcgcaccagcatcaactggcgttcaacaaccggcgtaatgcgctttaccaccagtgggctaccttcaggcaatggtagcgccagtgcgggaagaatactgatgccgatgcctgcggctaccatcgggaacagcgtcgccggatgtccaatctcctgcacaatattcgcctgaataccattgcgcgccagcgctgcgtcaatcagcggtcggctgccactcgcgtaatcctgcaacaccaatttcgctccctgtaatgcctgccagggtacataatcttccacggccaaagcgctatcgcgatggcaaagcagaaagaaaggctcggaaagaatcgcttcacattgcagatcgcccactgggcctggatcgatgacgatgccaaaatcgacatctccctggcgaatactttccattacccactgctgcggacgatcgtgcaggacaaactgaatatctggatagcggcgatggctttcagcaatgcattgcggaataagatgcgcggaaatggtctggctggcagcgacccgaacttttccgctcagttgttgccccatacgcccggtatcgcgcaacgtgctgttcagttcatccagcagtcgctcaagacgcaaagccagctgctgccctgcatctgtaagcaccacttcacgcgtggttctgtccagcaggcgaacaccagtatgattttccagttccttcacactgtgactcactgcgctctggctcaggccgatacgctctcctgcacgactaaaacttttctcctgcgctactgtgacgaaaacctttaattgttttaaagaataattcatctgttttcttcatgaatggatgcaataaatcaattttatttctcaaactggaagaagcacaatagaaccatcgatcatctggagtctttatgaaactttttcgtatcctcgatcctttcaccttaaccctgatcacggtggtgttgctggcctctttctttccggccagaggcgatttcgtccccttctttgaaaatctgaccaccgcagctattgccctgctgttctttatgcacggcgcgaagttgagccgtgaggcgattattgctggcggtggtcactggcgactgcatttgtgggtaatgtgcagcaccttcgtgctgtttccgattctgggtgtactgtttgcctggtggaaaccggtaaatgtcgacccgatgctctactccggttttctctacttgtgcattctcccggctaccgtgcagtctgcaatcgccttcacgagtatggcgggcggtaacgtcgcggcagcggtttgttctgcgagcgcatccagcctgctggggattttccttagtccattgctggttggtctggtgatgaatgttcacggtgcagggggcagccttgagcaggtcggtaaaattatgctgcaactgctgctgccgtttgtgttggggcatctttcccggccgtggattggtgactgggtgagccgcaataaaaaatggattgcgaaaactgaccagacgtccattctgttggtggtttatacagcgttcagcgaagccgtcgttaatggtatctggcataaagttggctggggaagtttgctgtttatcgtggtggtcagctgcgttcttctggctatcgtgattgtagttaacgtctttatggcacgccgactgagcttcaataaggcagatgaaattactatcgtcttttgtggtagcaaaaagagtctggcaaatggcatcccgatggcaaacattctgttccccacaagcgtgatcggtatgatggtgctgcccctgatgattttccatcagatccaattgatggtctgtgcggtgctggcgcgtcgatacaaacgccagaccgaacagttacaggcgcagcaggaaagcagcgccgataaagcttaaagcggacgcttcaggggctggaccagttgcgtcagcccctcggttttaatcagcagcgtgatttgcattagctcaccgagcttccctgccgggaactcatctttgcgggcaaaccacagcagatactcctccggcaggtcgattaagcgacgccctttgtatttgccaaacggcattatcgtattggctatttcaatcagctgctctttttccatctcagctacccagcaaacgcagcatttccgcttcgtcgatgacttcaatgcccagttcctgcgccttcgccagtttagatcctgcagcttcacccgctatcaccagatcggttttcttgctcacgctgcccgcgactttcgcgcccagttcgaccagtcgagctttagcgtcatcacggctcatctggcttaagctgcccgtaagcaccacggttttaccagcaaacgggctgtcaatctcttccgcgttgataacgatcggcgcaggccagtgaacaccttccgccaacagctcgctgatgacattgcggttgctttcttcggcaaagaagttgtgaacgtgggatgcaacgacaatgccaacatcaggcaccttttgcagctcttcaatgctagcggcttccagcgcttccagcgtgccgaaatatgccgccagacctgctgcggtggcctcgccgacttcacggatgccaagtgcatagaggaagcgagcaaaggtggtttctttcgctttttccagcgcgttaaccacgttttgtgcgctttttggccccatacgctccagtccggtcagtttgcctgcggtgagtttgaacagatctgccggagtatggacatattctttttcaaccagctgatcgatgattttgtcgcccattccgtcaacatccatcgcacggcgggaaacaaagtgtttcaggctctctttacgctgcgcaccgcaaatcaggccaccggtacagcgggcaaccgcttcaccttccacacgctcaacgtcagaaccacataccggacaatgcgtcgggaatacaacctcacgggtatcttccgggcgttcagaaagcacgacgttaaccacctgcgggatcacgtcgccagcgcggcgaatcaccactttatcgccaatgcgtaaaccaagacgttcgatttcatccgcattgtgtaaggttgcgttactcaccagcacgcctgcaacatggacaggttccagacgcgcaacaggcgtaatcgcgccagtacgcccaacctgaaactcgacgtcacgcacaaaggtcatctgctcctgcgccgggaatttaaacgctaccgcccagcgcggggcacgcgcgacaaagccaagctgctcctgctgtgccagactgttgaccttaatcaccacgccgtcgatatcaaagcccagcgtcgggcggtcttcttccactttgtgatagaacgccagcacttcttccgcgctttcacaaagcgttacccgatcgctgaccggcaacccccactttttaaattgcagtaaacggccaagatgagtatccggcagctcgccaccttccagaacaccaacgccatagcagaaaaaagtgagcggtcgcttcgctgtaatacgcggatcaagctgacgcagactaccagctgccgcattacgtgggttagcaaacactttcccgcccgtgcgtcgcgcatcttcgttaatcttttcgaaccccgcctgcggcaggaacacttcaccacgcacttccagacgcgccgggatattctctccgtgcagcttcagcggaatggcgcgaatagtacgcacattagacgtgatatcttccccggtggtgccatcgccacgggtcgcggcactgactaaaacgccattttcatacagaatactgacggcaagaccatccagcttcagctcacagcaccaggtgactttctcgttgtttttcagacggtcctgcacacgtttgttgaaagcaagaaagctttcttcatcaaaaacgttatccagactcagcattggtacttcatggcgtatctggctgaaagccgccagcggcgcagcgcctacacgttgagtagggctatcaggcgtaatcagttctggatgtttggtttccagctcgcgcagttcgcgcatcagcctgtcgtattcagcgtcgggaatttccggcgcatccatcacatgataaagatattcatgatggcgaagcgtcgttcgcagttctgtcagttgttgttcgatactttccatatcgcaccatcaatgctaaaaacccccgacaagcgggggttcgaagaggagttaatttgccttaagtgtatcaggcgttggcgtctttgacttcgcggatgatgtcctggtactcgcgcaatttctgcggagtcatcatacggcgctgatcgtcaagcacgacaccgcccacttcatcggcaatatgctgcgcagattgcagcatcagcttgaagttctgcagctcgtcaccgtaagacggtacctgcataaagatagtgacacccggagtagtgaaatccttcatttcaggatcaaaggttcccggtttcaccatattcgccaggctgaataacgccgggccgctgccatccgggctaagatgacgatggtaaatattcatatcgccaaaaatgaagcccgcttgttgaatgctgttaagaagcagttcaccgtttagctcgctaccgtgatgcgccgcgacgttcatgataatcaccgcttctttgcgcttcggtttatccataactggagcaggttccgctacaggctcaggctgtggtgccgctacgggttctgcaggctggaaagcctgttgtgccggttgcggtgcactatgcacaggctgcggcgctggcgcgacctgtgggctaactggctgctgcaacggctgttcaggctgcggctgataggcaggctgctgcaccggctgcgctggatgcggagcatgttgcggcggtacctgcgcttcaggcggctgctggaccggttgacgcggctgcgcagacgcataaggcggttggtactggtgttgcgggctcggacgagcagcctcatgctcctgagcgttagccggggcatgattcacgcggtgaacacgaacctcaccaacgccctcatcatcttcgacatcctcgtcataagaatcgtcgtcacgtttactcttcattcgttttaatggccgatcgcggaacatagaagatcgttctttacggctggtccagaaaccatgtaccagtaaagcgattatggcgatcgcgccaacaatgattaatatcagacgcaaatcctgcatcattatattctctgttgttctaacaccttgccaccacggcaaacatttactcactaagagtatttgccgattacctcaagtgcaagtgcactattaactttcacagcacaaagatagatgaaatcgtgctttttgctgttttttcgaacatatcctaactgtccattgcgcaattacccggtaaaatacgcagaattttcctgggattggtcaaaaggagctcatcctgattatggttagtagtttcacatctgccccacgcagcggtttttactattttgcgcaaggctggaagctcgtcagccaacctgggattcggcgtttcgttattttaccgctgctggtcaatattttgttgatggggggcgcattctggtggctctttacacagctcgatgtctggatcccgactctcatgagttacgttccggactggctacaatggctgagttatctgttgtggcctctggctgtcatctctgtgctgttagtgtttggctatttcttctccacgattgctaactggattgccgctccgtttaacggtttattggctgaacaactggaagcacgattgactggcgctacaccgccagataccgggattttcggtatcatgaaagatgtgccgcgaatcatgaaacgcgaatggcaaaaatttgcctggtatctgccgcgcgcaattgtattactaattctttacttcatccctggtattgggcaaaccgtcgcgccggtactgtggttcctgtttagcgcctggatgttagccatccagtattgcgattaccccttcgataaccacaaagtgccgtttaaagagatgcgcaccgccctgcgcacacgcaaaatcaccaatatgcagtttggtgctttaaccagcctgtttacgatgatcccgctgcttaatctgttcatcatgcccgttgccgtttgtggcgcgacggcgatgtgggtcgattgctatcgcgataaacacgcgatgtggcggtaacaatctaccggttattttgtaaaccgtttgtgtgaaacaggggtggcttatgccgccccttattccatcttgcatgtcattatttcccttctgtatatagatatgctaaatccttacttccgcatattctctgagcgggtatgctacctgttgtatcccaatttcatacagttaaggacaggccatgagtaagatttttgaagataacagcctgactatcggtcacacgccgctggttcgcctgaatcgcatcggtaacggacgcattctggcgaaggtggaatctcgtaaccccagcttcagcgttaagtgccgtatcggtgccaacatgatttgggatgccgaaaagcgcggcgtgctgaaaccaggcgttgaactggttgaaccgaccagcggtaataccgggattgcactggcctatgtagctgccgctcgcggttacaaactcaccctgaccatgccagaaaccatgagtattgaacgccgcaagctgctgaaagcgttaggtgcaaacctggtgctgacggaaggtgctaaaggcatgaaaggcgcaatccaaaaagcagaagaaattgtcgccagcaatccagagaaatacctgctgctgcaacaattcagcaatccggcaaaccctgaaattcacgaaaagaccaccggtccggagatatgggaagataccgacggtcaggttgatgtatttattgctggcgttgggactggcggtacgctgactggcgtcagccgctacattaaaggcaccaaaggcaagaccgatcttatctctgtcgccgttgagccaaccgattctccagttatcgcccaggcgctggcaggtgaagagattaaacctggcccgcataaaattcagggtattggcgctggttttatcccggctaacctcgatctcaagctggtcgataaagtcattggcatcaccaatgaagaagcgatttctaccgcgcgtcgtctgatggaagaagaaggtattcttgcaggtatctcttctggagcagctgttgccgcggcgttgaaactacaagaagatgaaagctttaccaacaagaatattgtggttattctaccaagtagcggtgagcgttatttaagcaccgcattgtttgccgatctcttcactgagaaagaattgcaacagtaatgccagcttgttaaaaatgcgtaaaaaagcacctttttaggtgcttttttgtggcctgcttcaaactttcgcccctcctggcattgattcagcctgtcggaactggtatttaaccagactaattattttgatgcgcgaaattaatcgttacaggaaaagccaaagctgaatcgattttatgatttggttcaattcttcctttagcggcataatgtttaatgacgtacgaaacgtcagcggtcaacacccgccagcaatggactgtattgcgctcttcgtgcgtcgcgtctgttaaaaactggcgctaacaatacaggctaaagtcgaaccgccaggctagactttagttccacaacactaaacctataagttggggaaatacaatgttccagcaagaagttaccattaccgctccgaacggtctgcacacccgccctgctgcccagtttgtaaaagaagctaagggcttcacttctgaaattactgtgacttccaacggcaaaagcgccagcgcgaaaagcctgtttaaactgcagactctgggcctgactcaaggtaccgttgtgactatctccgcagaaggcgaagacgagcagaaagcggttgaacatctggttaaactgatggcggaactcgagtaatttcccgggttcttttaaaaatcagtcacaagtaaggtagggttatgattagtggcattttagcatccccgggtatcgctttcggtaaagctctgcttctgaaagaagacgaaattgtcattgaccggaaaaaaatttctgccgaccaggttgatcaggaagttgaacgttttctgagcggtcgtgccaaggcaagtgcccagctggaaacgatcaaaacgaaagctggtgaaacgttcggtgaagaaaaagaagccatctttgaagggcatattatgctgctcgaagatgaggagctggagcaggaaatcatagccctgattaaagataagcacatgacagctgacgcagctgctcatgaagttatcgaaggtcaggcttctgccctggaagagctggatgatgaatacctgaaagaacgtgcggctgacgtacgtgatatcggtaagcgcctgctgcgcaacatcctgggcctgaagattatcgacctgagcgccattcaggatgaagtcattctggttgccgctgacctgacgccgtccgaaaccgcacagctgaacctgaagaaggtgctgggtttcatcaccgacgcgggtggccgtacttcccacacctctatcatggcgcgttctctggaactacctgctatcgtgggtaccggtagcgtcacctctcaggtgaaaaatgacgactatctgattctggatgccgtaaataatcaggtttacgtcaatccaaccaacgaagttattgataaaatgcgcgctgttcaggagcaagtggcttctgaaaaagcagagcttgctaaactgaaagatctgccagctattacgctggacggtcaccaggtagaagtatgcgctaacattggtacggttcgtgacgttgaaggtgcagagcgtaacggcgctgaaggcgttggtctgtatcgtactgagttcctgttcatggaccgcgacgcactgcccactgaagaagaacagtttgctgcttacaaagcagtggctgaagcgtgtggcagccaagcggttatcgttcgtaccatggacatcggcggcgacaaagagctgccatacatgaacttcccgaaagaagagaacccgttcctcggctggcgcgctatccgtatcgcgatggatcgtagagagatcctgcgcgatcagctccgcgctatcctgcgtgccagcgctttcggtaaattgcgcattatgttcccgatgatcatctctgttgaagaagtgcgtgcactgcgcaaagagatcgaaatctacaaacaggaactgcgcgacgaaggtaaagcgtttgacgagagtattgaaatcggcgtaatggtggaaacaccggctgccgcaacaattgcacgtcatttagccaaagaagttgatttctttagtatcggcaccaatgatttaacgcagtacactctggcagttgaccgtggtaatgatatgattagtcacctttaccagccaatgagtccgtccgtgctgaacttgatcaagcaagttattgatgcttctcatgctgaaggcaaatggactggcatgtgtggtgagcttgctggcgatgaacgtgctacacttctgttgctggggatgggtctggacgaattctctatgagcgccatttctatcccgcgcattaagaagattatccgtaacacgaacttcgaagatgcgaaggtgttagcagagcaggctcttgctcaaccgacaacggacgagttaatgacgctggttaacaagttcattgaagaaaaaacaatctgctaatccacgagatgcggcccaatttactgcttaggagaagatcatgggtttgttcgataaactgaaatctctggtttccgacgacaagaaggataccggaactattgagatcattgctccgctctctggcgagatcgtcaatatcgaagacgtgccggatgtcgtttttgcggaaaaaatcgttggtgatggtattgctatcaaaccaacgggtaacaaaatggtcgcgccagtagacggcaccattggtaaaatctttgaaaccaaccacgcattctctatcgaatctgatagcggcgttgaactgttcgtccacttcggtatcgacaccgttgaactgaaaggcgaaggcttcaagcgtattgctgaagaaggtcagcgcgtgaaagttggcgatactgtcattgaatttgatctgccgctgctggaagagaaagccaagtctaccctgactccggttgttatctccaacatggacgaaatcaaagaactgatcaaactgtccggtagcgtaaccgtgggtgaaaccccggttatccgcatcaagaagtaattcttgccgcagtgaaaaatggcgcccatcggcgccatttttttatgcttccgccagcggcggcaaaatcaattcatcgctctcatgctgctgggtgtagcgcatcacttccagtacgcgcaaccccgctcggtgcactgcatcggttaacgccttccctttcagcaagccactgatgagctgagcacaaaacaggtcgccagtccctttcaggtcggtttttacccgactatgggaaatgacattcacgctgtcggcagtgaccaccacaacctgcatctcctgattttcttcattaccggaggcgctggtaaccaccacccattttaatgtgtcactaagcagactttttgcggcagcaatggcactgtcgagatcgcggcaatttttaccggtcaggatttccaactcaaagatattgggggtaattccctgcgccagcggcagtaaatattgtcgatacgcttcgggaaggtcaggtttgacataaattccgctatcaatatcgccaatcaccggatcgaccatgatcaataggtcaggatggtctttgcgtagcgcagtcagccactcggcaaggattttgatttggcttgccgttcccatatagcccgtggttacagcacgaagttggcgcagcgcatcacgctcctgaagcgcacgcaaatagccgctaaaccattcgtccggaatcgcaccaccgtagaaagtgtcataatgcggcgtattgctcagcaataccgtcggcacggcaaagacattcaggccgttctgtttgatagcaggcacggcaatgctgttgcccacgctgccgtaaaccacctggctctgcacggcgacgatatccgcctgcagtgccctactcttatcgttaaacaacaacaaactactcatttaattttttctccttgccgatgatcctcatcgtaatccaaccgaaactttacctgattctggcagtcaaatcggctatcacaaaacaaggataaggtaattcaatgaagaaaatcatttgtctggtcattacactactaatgacactccccgtttacgcgaagttaactgcccatgaagaagcccgcatcaacgccatgctggagggattagcacagaaaaaggatttgatatttgtgcgcaacggtgatgaacatacctgctatgaagcggtttctcatctgcgtctgaagctcggcaatacccgtaaccgcattgacactgccgagcagtttattgataaggttgctagcagcagtagcattactgggaagccgtatattgtgaagatccccggtaagagcgatgagaacgcacagccttttttacatgcgttaattgcgcagacggataaaacggtgcctgcggaaggaaattaatccgctttgggaaggcatttacaggaggtaacatgaaaaaacgctttatttatcacgatgaaaaaagcaataaattttggtggatagattacgaaggggatagtttagctgtcaactatggcaaggtaggtagtattggtaaattccagacaaaagagttcgataatgaagaacagtgtctgaaagaagccagtaaattgattgccgcaaaaatgaagaaaggctatcaagaagatccaaagtttaacttcatggatcgctactattttgatgatgaagaaattgggttacatgttaaaacgagtcacccaaacttccagtgccattttactgatccactttatatgtgttgctgggatgaagaatctccttttggcagcgatgaaggtgctgatgctctaaacgttcttgaaaatagcctccgtaaagagccggatctggactgtgctgatttccctcaaatgttaattgaaactatgtggggtatgaaatacatcgctatggacagtattcttgaagaggatgttcgtgcgcaattactagtcgatgaaatgagcactatccagagcaatatgattacctacgcaactgcattcggtcagattaaagtcatgggtaaaatctcccataaacttaaaaagatgggactcaatgcactagcgcgtcatcagcttaccgcaaaaattcttcaatggggtgacggtcaggacagtccaatacttcaaaaaatgattgatgaccttacggcgtttcctcacgaaaattaaatactgcatttgtcggcagcaacaactgttaaaaaagtgcgctttgtttatgccggatgcggcgtaaacgccttatccggcctacaaaatcgtgctaattcaatatattgcagaaaccttgtaggcctgataagcgtagcgcatcaggcagttttgcgtttgtcatcagtctccgatgctattaatccttaaatccccgccccctggctaaaatgctcttccccaaacaccccggtagaaaggtagcgatcgccacgatcgcagatgatcgccaccaccaccgcgtcagggttagcttttgccacccgcagtgctccggcaaccgcgccgccggagctgacgccacagaatattccttcccgcaccgccagttcgcgcatggtgttttccgcatcgcgctgatgaatatccagcacctcatccaccagagaagcgttgaaaatccccggcagatattccgtaggccagcggcgaatgccgggaatgctgctgccctcttccggttgcaggccgacaatggtcaccggtttggattgttcgcgcataaagcgactgacgccggtgatagtgccggtcgtccccatgctggagacaaaatgagtgatgcgcccgccggtttgctgccagatttccggcccagtggtggtgtaatgcgcataagggttatcgggattattgaactgatcgagcagctttccttcgccacgattcgccatctccagcgccagatcgcgcgcaccttccatgccctgctctttggtgacaagaatcagttccgcaccataagcacgcatcgccgcacggcgttcctggctcatgttgtcgggcatcagcaatttcatgcgatagcctttcagcgcggcaatcattgccagcgcaatgccggtgttaccactggtggcttcgattaagacatcacccggtttaatttccccgcgcttttccgcctcgacgatcatgctaagtgccgcacgatctttcacgctacctgccgggttattgccttccagttttaaccacacttcactgccgttatccggccccattcgctgcaacttcaccagaggcgtattgcctattgtttgttctaatgtactcacgatctctatccatacgtggtgttgcctgatgcgacgcttgcgcgtcttatcaggtctacaggttacaaaccttgccattaaaaagcccggatcgcgggaagcgcctccgggcgtttaacattcactcaacctatcaggcgctttgtgcgagagcaagttcctcatcgcgggtttcgatacgctcgtcgccgttatacagccgcgcatgttgcagaccaacgaataaacgctcgccacgctgcggggcatcgtcgccatgcatcacgaccgtcagcggttcgttgtaccaccccagcggctgcaccactaattgggtgtagtgacctttcgggctggcttccagtacctgtaccggcagcgggctatcgaggctggtacggcggctgatatccacttcccaagggcgcaggaagagatccaccggcccctgatacgcaggtgtgtagcccagcggccagcgatgcgcgccaacatggaactgcccgccgcgaatggttccctgcaggcggttcacttcgcccataaattcgagcacaaaacgggtcgccggttcgcgccatacctgatccggcgcgtcagcctgttcaatattgccctggctcatcacaactacacgatcagctacttcggtcgcttcttcctgatcgtgggtcacaaaaacgctggtgaattttagttcttcatggagttgacgcagccagcgacgcagctctttacgcacctgcgcatccagcgcgccaaacggttcatcaagcagcagaatttgcggttccacagccagcgcgcgcgccagcgccacgcgctgtttctggccgccggaaagctgcgccggataacgatccgccagatgggcaagctggaccatttccagcaattttgtcactttcgctttgatggctgcggcattcgggcgctcgcgacgcggcagcaccgtcaggccaaaagcgatattgtcgaacaccgtcatatggcggaacagcgcgtaatgctggaacacgaaaccgactttacgatcacgtgcgtgcaggcggctcacgtcggtgccgtggaagcgaatatgcccgctggtttgatgctccagcccggcgataatgcgcagcagcgtggttttcccggaaccggacggccccagcaacgcgaccatctgaccactaggaatatccagactgatatcgttcagcacctgggtgcgaccaaagctcttcttaatattggcaatctcaatgctcatgatgttcctcctgctgtgcgcgtttttcctgattctccaggcgccactgcaacatactttttaaaaacagggtgataatcgccatcagcgttaacagcgccgcagcggtaaaggagccgacggtgttgtagtcctgctccagcaattcaatctgtaacggcaggctcagggtttcgccgcgaatgctgccggaaaccacgctcaccgcgccaaactcgccaattgcgcgggcgttggtcaacaccacgccataaagcagcgcccagcggatgttcggtaatgtgacgcgacggaacatctgccagccggacgcgccaagcaaaatcgccgcttcgtcttcctggctgccctggcttaacatcaccggcaccagttcgcgcaccacaaacggacacgtcacgaagatggtgaccagcaccattcccggccaggagaacataatttgcaggttatgctcgtcgagccaaccgccgagcgggccgttagagccgtagaacagcaaatacaccagaccggcaaccaccgggcttacggcaaacggaatgtccagtagcgtcagcagtaactggcgtccagggaagttaaagcgcgtcaccagccaggccagcagaatgccgaacaccaggtttaccggtacggcaatcagcgcgatcatcaccgtcagccagatggcgtgcagcatgtccggatcggccagattctgtaaaaccggcatcagccccttgctgaatgcctgcacgaagatgtaaatcatcggcaccagcaggatgaacgcgctaaccagcatcccgatgccaatcagaaaccatttgccccagttaatcgggcgcgcgtcataacgcttcaattgggtaacttccgccattaatgacctaccacacgccgaccaaagcgactttgcagagtgttaatactgaacagcagcagcagagatgccgcgaggatcacgctagcaatcgcgctcgctgccgggtaatcaaactcctgtaagcgcacaaaaatcatcaggctcgtcacttccgtcttccacgcgatatttccggcgataaaaatcaccgcgccaaattcaccaagactacgggtaaagctcagcgccacgcccgccaccagcgccggagaaagctccggcagcaccactttgcagaaactctgccagcgcgttgcaccaagcgtttccgccgcttcttcatattccgggcctaactcttccagcaccggctgcacggtacgcaccacaaacggaatgctggtaaaggccatagccaccgcaatccccagccatgtataggtgactttgatatcaaacttcgccagccattcaccgtaaaaaccgtttacggaaaagaggctggccagcgttaaaccggcgacagccgttggcagcgcaaagggtaaatccatcagcgcatcaagcagcgtgcggcctgggaagcgatagcgggttaggatccacgccatcagcagaccgaaaacgccgttaaaaatgcttgccacaaacgcgctcagcagcgttactttgtaggccgcgaccacctgcgggttggtgatcacctcccagtactgcgcccagctcatctgggccagttgcatcaccagcgcggagagcggcagcagcaaaatcaggcacacaaacagcagactggtgccgaggcttaaggtaaagcccggcagcacgcgtctggaggagacagcaaacatcagttacgccccgccgctaacagcttgtctaactcgccgccgctggtgaagtgggttttcatcacttccggccaggagccaaatttgtcttccacgcggaacagctcggtctgcgggaatttgtctttcagtttgtccatcacctccgggttattcacgcggtagtaatagtcggtgatgatggtttgcgcctgcgggctatagagccagttcagataggctttggcggctttttccgtaccgttggcctgcacgtttttatcaacccacgccaccgggaattccgccagaatgttggttttcggaatcaccacttcaaagccctgcgcttcatactgtttacggatgttgttcacttcgctttcgaagctaatcagcacatcgcccaggccgcgctcggcaaaagtggtggtcgcgccacgaccgccagtatcgaacacttcaacgtttttcaggaactgggtcataaactgttcggttttgcctttgtcaccaccgtcagctttatccgctgcgccccatgccgccagataggtataacgcgcgttaccgctcgttttcgggttcgggaaaatcagcttcacgtcggagcgcaccaggtcgttccaatcgtggatattcttcgggttacccttacgcaccaggaagcccatggtggagtagaacgggctgctattattcggcaggcggctctgccagtcggccgggatcagcttgcctttatcgtgcaggatttgtacgtcggtcacctggttataagtgacaacgtcggcttttaagccctgtaaaatcgccagcgcctgtttactactcccggcatgagattgttttatcgtcagtttgtcgccgccgttatcttttgcccattgttgctcaaacggcggattcagggcggcaaacagctcgcgggagacgtcataagaactgttcagcagttccgttgcctgtacatggcccgccagcagcagagaagcgaccagcgcgagactgttctttttcagtaagttaacggccattgcgcacccttataaatttaatgactttctaatagccatcatatttataacggacgtgaaaggagtaacggttttatataccgtttggtgatttggaagttgaaaagggaataagaacttggttcaacaggcgtaattgttgcagtcagtttggacacgaacagcgcggagaaaccggagcgtacacatagtacgtgaggatttcgagcactgcccggggccaaaatgacaaataaaatagcctggtgaacttagttcaagacgaaatcctccccacaaatgcagggaggaaacagaggtgaatcagataccgacgctaaccgtctccggcagtgtgctgccgccatcaatcacattctgtgtaccggttaaatagctggattcatcgcttgcgaggaaggccgccagttcgccgacttccagcggatcggcgaggcgacgcatcgggattgctttcgccatttcagtcagcacgctctctggatcttccgggttgctctggcgggcaatgctttccgccattggtgtgcgcacgtatcccgggcaaatggcgttaacgcgaataccagactgcgcgtactccaccgccaggctttttgtcaggccaacaatcgccgctttcgttaaggcgtacgccgtttcgccaggatcggccaccatatcaccagtgacactagacatcatcacaatgcgaccatctttgcgggcaatcatctccggcagcaccgccttcgtgacgttccatacgcctttaatattgatgtcaatatggaaatcgcgatcgtcatcgctcatatcgaggaaactgcccagacgacaaacgcctgcgttattcaccaggatatcaatgcgcccttctttttccttcgcgcgtttgatagctgcggctacgctcgccgggtcacgcacatcggcgacaaccgccgtacagcgatgaccacgaccacacagttcgtccgccagcttttcgatctcaggggagatatccagcaagattaggttcgcgccatgacgtgcaaaagttctggcaattccttcgccaattccctgcaatgcgcccgtaatcagtgctgtcttgcccgtgagtttacccattttaatgctctccttgttaatacagagcgttacactccattccctctgaaaatacaggataaacaaaatattgctgcggatcagctcactaattcaggaaaatctcaatccagtcgctgctttatgcatcatttcaggcgttgtgttagctcactgctgcgctgaatcattttcaaactctccacatcattgagttgcacaaggccaacaaacagtaaatcggtaacagaattttgcgccgtgcgggtagacatgctgctgctacgccattcggtttctccggaaacggtatcgagggtgaaatgcgccagccgccgcagcggagagtcagtcagagaagtaatggcaatcaccgttgccccctgctttcgtgccgcttctgcgcacaagacaatctcttttttactgccgctgtaagagatagcgatttgtacatcgccttttttcaacgcctgagaaacggtggcttgtacgtgcgtgtcggcttcgcaggccacgcgatagccaattttcatcagtttgaagctcagatcgcgccccaccagcgcgcttccgcccaggcccgttatctggataaacggtgctttactgatgacctcaatgattttttgcagccgcgcgtaatcgagcaacgcgcaggtttgctccagcgccagctctttttcgcgattcagtttgcgcgcgatcacttccaggctatcatcactggtaatgctactgtgcaggtgcagtgccgtggcattcgttttctcccggctggcactgtattcgcctattaacgccatacgcaattcagtaaatccttgcgcgccgagtttttgggcaaatttcactatgctgctctggctaatgccgagctgtttcgccatctgccgactagaaacggattgcagctcactcacgttggcctgcagaaagtcagcgattttttgctcgttttcggtgaattcactccccgcattgcttattttcgtcaggtacaacatcttccactctcctgggctggcagcataaattccgcttaagttcttatgacgctcttcacactctgcgagtgtagactcaatgattcctttaagcctgtcaattcgggatatatgattccatacatctgcaattatttgatcgtaaatagtaaggtcaccaccgatgcaatttgaaaagatgattactgaaggcagcaacaccgccagcgctgaaattgaccgcgtaagcacgctggaaatgtgccggattatcaacgatgaagataaaaccgtaccgcttgccgttgagcgcgtactgccggatatcgccgcggcgatcgatgttatccacgcccaggtaagcggcggcgggcgtctgatttacctcggtgcgggaacatccggtcgtctggggattctggatgccagcgaatgtccgcccacctacggcgtgaaaccgggtctggtggttggtttgattgctggcggcgaatatgccattcagcacgcggtggaaggcgcggaagatagccgggaaggcggtgttaatgatctgaaaaatattaatttaacggcacaggatgtggtggttggcattgctgccagcggtcgcacgccgtatgtgattgccggactggaatacgcacgccagctcggctgccgcacagtgggaatttcctgtaatccggggagcgccgttagtaccaccgctgagtttgccattacaccgattgtaggtgccgaagttgttaccggttctagccggatgaaagcaggtacagcgcagaaactggtgctcaatatgctttccaccgggctgatgattaaatccggcaaagtgttcggcaacctgatggtcgatgtggtcgccaccaacgaaaaactgcatgtgcgacaggtcaatattgttaaaaacgccaccggatgtagcgcagagcaagcggaagcggcgttaattgcttgcgagcgcaactgtaaaacggccattgtgatggtgctgaaaaatctcgatgccgcagaagctaaaaaacgcctggatcaacacggcggctttattcgtcaggttttagacaaggaataacccatggccaaagagatcagcagtgaacttctgaacaccattcttacccgtgtcggcggaccgggaaatatcgccagttgtggtaactgtatgacgcgcctgcgtctgggtgtacatgacagtagtctggttgatcccaatatcaaaacgctggaaggcgtgaagggcgtcattttgaccagcgaccaggtgcaggtcgtttttgggcctggtaaagcgcatcgtgccgcaaaagcgatgagcgagctgctgggagaagcaccggtacaggatgccgcagaaatcgccgcccagaacaaacgtcagttaaaagccaaacaaacctccggcgtgcaacaatttctcgccaaattcgccaccatcttcacgccgctgatccccggttttattgccgccggtctgctgctggggatagcgacgttaattgccacggtgatgcacgttccggcagatgctcagggaacactacccgatgcgctgaattttatgaaggtgttcagcaaaggtttgttcactttcctggtgattctggtgggctataacgccgcccaggcatttggcggcacgggcgtaaatggcgcaattatcgccgcgctctttttgctcggttataaccccgcagcgaccaccggttactacgccggttttcacgatttctttggtctgcccatcgatccgcgcggcaatattatcggcgtgctgattgccgcgtgggcctgcgcccgcattgaaggcatggtgcgccgctttatgccggacgatctcgacatgctgctgaccagcttaatcaccctgctgatcaccgctacgcttgcgtacctgatcattatgccgctgggtggctggttattcgaaggtatgagttggctgtttatgcacctgaacagtaatccgttcggttgtgcggttttagccgggctgttcctgatcgccgtggtatttggcgtgcatcagggctttattcctgtttacctcgcgttaatggacagccagggattcaacagcttatttcccatccttagtatggcaggcgcgggccaggtgggcgcggcgctggcactctactggcgggcgcaaccgcacagtgcgctacgcagtcaggtacgcggggcgattattcccggcctgctgggcgttggtgaaccgctgatttacggtgtcaccctgccccgcatgaagccgtttgttaccgcctgtttaggcggcgcggcgggcggtttgtttatcggcctgatagcctggtggggtctgccgatgggcttaaacagcgcctttgggccgtctggtctggtagcgctgccgctgatgacttccgcacaaggcatccttccggccatggcggtttatgctggcgggattctggtggcatgggtttgcgggtttattttcaccacgctctttggctgccgtaacgtcaatctggactgatatcatgaaacggacaatgctctatctttctctgctggctgttagttgtagcgtcagcgccgcaaaataccctgttctgacagaaagcagcccagagaaagcagggtttaacgtcgaacggcttaaccagatggatcgctggattagccagcaagttgatgtcggttatcccagcgtaaacctgctgatcattaaagataatcagattgtgtatcgcaaagcctggggagcggcgaaaaagtacgatggcagcgtgttgatggaacagcctgtcaaagccaccaccgggacgctgtatgacctggccagtaacaccaaaatgtacgccacgaacttcgccctgcaaaagctgatgagcgaaggcaaactgcatcctgacgatcggattgcgaaatatattccggggtttgccgatagtccaaatgacaccattaaaggcaaaaacaccctgcggatttctgacctgctgcatcacagcggcggtttcccggcagatccgcaatacccgaataaagcggtcgcgggcgcgttatattcccaggataaaggccagacgctggagatgatcaagcgcacgccgctggaatatcagcccggcagcaaacatatctacagcgatgtcgattatatgctgcttggatttatcgtcgagagcgttaccggtcagccgcttgaccgctatgttgaagagagcatttatcgcccgctcggcctgacacatacggtatttaacccgctgctgaaaggctttaaaccgcaacaaattgccgccacggaattgaacggcaatacccgcgatggcgtgatccatttcccgaatatccgcacctccactctctggggtcaggtgcacgatgaaaaagccttttatagcatgggcggcgtttccgggcacgcaggtttgttttccaataccggcgatattgcggtgttaatgcaaacgatgctgaacggcgggggctatggtgatgtgcagctgttcaatgcggaaacggtgaagatgttcaccaccagctctaaggaagatgccacttttggcctcggctggcgcgtgaatggtaatgccaccatgacgccgacgtttggcacgctggcaagcccgcaaacctacggtcacactggctggaccggaacggtgaccgttatcgatccggtgaatcatatgacgattgtgatgttaagcaacaagccacatagcccggttgccgatccgcaaaagaatcccaatatgttcgaaagcggtcagttgccgattgcaacttatggttgggtagttgatcaggtgtatgcggcgttaaagcagaagtaataaaaaggccagtcagtaatgttactggctggtctgagagtgctgacaaacgcaaaactgcctgatgcgctacgcttatcaggcctacgtggagcccacaatatattgaattagcacgatttcgtaggccggataaggcgttcacgccgcatccggcgtgtacaacgcgcacttggtcaacaatctgaggccagtcagtaatgttactgcctggcctttaatcaatgaatcagaaacgcttacagcgccatcaacttgtccaggctcggtgcgaaataatagccgccggttaccggtttggtgaaacgcaacatcgcatcacgcttaccatcggtatcgccaaacatgctcagcagttgctgctcaatgttatgcagacgcgcgcagtaggcgcagaagtacagaccgtgagtgccactggcagtgccgtacggcaggctctggcgaacaatcttcagccctttgccatcttctttcagatcaacgcgggtgaggtgagaggtttccggacgttcgtcgccgtcgatctcttcgttggcctctttggtgcgcccgatcaccatctcctgatcgtgaacgctcatccggttgagctgcttcaggttgtgttcccaacgctggacaaacacatagctgccgcccgcatccacgccgtctttgataaccgccacttcgcgacgcgtctcttcacccgccgggttttccgtaccgtcaacaaagccgctcaggtcacgctcttcaacccaacggaagccgtggatctcttctttcacttcaatgcagtcaccaaaggcttccatcgccgcctgggcgacagagaagtttacgtcgtgacgcagagaaagaatgtggatcaacacatcgaactgggtcgtcggcgcaaggcctttaccgtagcccggaaaatctttcagctcttctgccccaacgccgccgctcagagcgcgccaggtgttgttaccaaaggcaaccaccgcaccaagatgcgcgtccgggaatttcgcttcaaaagttgccagtttgtcggcaaatgttttactggccgcacgcagggcgtcaacttcccctttcacgttggcttcgatccaaatcgccgcgcggcaatgttctggcaaaatgccactctgaacctgagacattgttcctcctgaaaataataatgccacgcaatccgtggcattgttgagcgctattttacgtgttttttcgcggcggcggtttgttcagacgcaaattaacgccgccagataattttactgactttccagtttttcagggtatcgtcgctaggcattaacccttcaggaccacgccattccccgctgaactggtagctaatatgttgactgccttcggctttacattcgacggcacgattatcatcaccatcagctttttggcaattgccaaatgctttgctgtaaaggtcgctaaacggtgtaccgattttaacaccggtgtcagcaggaatatcgctatccagcacgtcaatgcgactgatcgtgccttgatcgccgttaatcaccatcgccacgttgtcgcccttcatcacttcaaaaaagcgcaccacgttgccgttcgcggttttcattccgctgcgcaggcgataatcgccatcaagcgcatcggcaatggcttgttcttgcagtggtgtggacgccgttaattcacccacgccctgctcgctcactttggtggagctcccaaaccagttccacgggttagcggcagaccagttaacactgctcatcgtggaacagccggtcagcatcaatggcatagcgcataacattaaacgcaggcttttcatgtcacttcctttggttattcaataacgttgcttggagtgcaaattcaccaaaaagtgccgttattcttttacttcataaaaacaagcgcgtaaacgtcgattggtcagcagccagattaacgccacaatatccgccactaccagcgccagaccgataccgctaacggattcaccgttcagccacagccacggttgccagcaaagtaaaaccacctgcgccaacagcaacagaaaatagagtacacgccaggtgcgaggaaacgtagcccgccgaccgctcaacaaaaacgccagcaccgccggaatgccaggaatcagccccagccagaaattatcgtgatcgggataaaacagatttagcagcgcagtaccctgctcgcggctcgcaccggcaatgacaaacagcacccaggttcgcgcctgaagcaatagcacaagccagaagagcaagggtaaacgcaggcgaccgtgcgcatcataatggacaggatgaaactcagtactcttcatcttcaatcaaacgcttacccagactcagcacgtcggcgtgttcatatcccaggcgttcatacattccgagcaccatgtcgttatcttccggcacattgatctgaattttcgggcagccacgagcaatcagctttttctccagccgattaagcaacgcattggcaatcccacgcccacgaaactctggatgcacgccaagataataagcagacccgcgatgcccgtcataaccgcccatcaccgttccgaccacgtcaccgtttacctcagcgaccaaaaacaaactgacgtcatggttcatcttacgctcgatgtccatttccggatcgttccacggacgcagcaagtcgcaacgctcccaaagggtgatgacctcttcgaaatcttcctggcgaaatacgcgtatctccatggtattcgttacctttttgcgggttaaaaggctgattatggcgtgaacggtcgaattagccaatatctgacgaaaatcggttgaaaaagtggcataatggggagttgtcaactattgaaatgaaaagtaaaacaattctcaacagcaaaccgtcgtaacggattacgcgatacgatataacatctggaactttattattacaactcaggccgtatgagcacttttaaaccactaaaaacactcactagccgccgccaggtgctgaaagccggtttggctgccctgacgttgagtggaatgagccaagccatcgccaaagacgaacttttaaaaaccagcaacggacacagcaagccgaaagccaaaaaatctggcggcaaacgtgtcgttgttctcgatccaggtcacggcggaattgataccggagcgatcggacgcaacggtagcaaagaaaaacatgtggtgctggcgattgctaaaaacgtccgttccattttgcgtaatcatgggattgatgcgcgtttaacgcgttctggcgatacgtttatcccactttacgatcgcgttgaaatcgcccataaacatggcgcagatctgtttatgagtattcatgccgatggctttaccaacccgaaagctgccggtgctagcgtatttgccctctctaaccgtggggcaagtagcgcaatggcgaaatacctgtctgaacgcgaaaaccgcgccgatgaagttgccggtaaaaaggcgactgacaaggatcacctattgcaacaagtgctgtttgatctggtgcaaacagataccattaaaaatagtctgacgctcggcagccatattctgaagaagattaagccggtgcataaactgcacagccgcaacaccgaacaagcggcatttgtggtgttgaaaagtccgagcgttcctagcgtgctggtggaaaccagctttatcaccaacccggaagaagaacggctgttaggcacggcggcgtttcgtcagaaaatcgccacagcgattgctgaaggcgtgatcagttatttccactggttcgacaaccagaaagcacatagcaaaaagcgataagttatgaaacccgacgcacaccaggttaaacagtttctgctcaaccttcaggatacgatttgtcagcagctgaccgccgtcgatggcgcagaatttgtcgaagatagttggcagcgcgaagctggcggcggcgggcgtagtcgggtgttgcgtaatggtggtgttttcgaacaggcaggcgtcaactttagccatgtccacggtgaggcgatgcctgcttccgccaccgctcatcgcccggaacttgccgggcgcagtttcgaggcgatgggcgttagtctggtagtgcatccgcataacccgtatgttcccaccagccacgcgaatgtgcggttttttattgccgaaaaaccgggtgccgatcccgtctggtggtttggcggtggcttcgacttaaccccattctatggttttgaagaagatgctattcactggcatcgcaccgcccgtgacctgtgcctgccatttggcgaagacgtttatccccgttacaaaaagtggtgcgacgaatacttctacctcaaacatcgcaacgaacagcgcggtattggcgggctgttctttgatgacctgaacacgccagatttcgaccgctgttttgcctttatgcaggcggtaggcaaaggctacaccgacgcttatttaccaattgtcgagcgacggaaagcgatggcctacggcgagcgcgagcgcaatttccagttatatcgtcgcggtcgttatgtcgagttcaatctggtctgggatcgcggcacgctgtttggcctgcaaactggcgggcgcaccgagtctatcctgatgagtatgccgccactggtacgctgggaatatgattatcagccaaaagatggcagcccagaagcggcgttaagtgagtttattaaggtcagggattgggtgtaactccctcacccccactcccgcatccgctgatgcagcgtcagactcggcttctcggaaaacagctgctggtaatccgtggcaaattgccccagatgccagaatccccactgcatggcggcgtcttttaccgtcatactttggctccacggacttatcagttcgcggcgtacggcgttcaggcgaatgcgtttcagccacgcgttcgggccaatgcctaaaatagcgtgaaacgcgttttgtagcgtgcggcggctgacatgcagttgattacacaaatccagcaccgtcaccggttcggacatgttttccagcacatattcacgggcgcgggaaagcaatcgacggtaactctgatgactgatgctttccgccgtcaccattggttgcgcttcttccagcatggcccccatcgccattagcaaattatcccccagcacttttcgcactgcaggctgatggagattttccggattctcgcaaaacgtcgccagcgcctgttggacaaagccccacagcgcggctttatgctgctctttcacttccagcgcgctctggttacgcaacatatgtaatacccgatccgggttatgcaaaaagttagcctgccgggtgatgacatcttcagaaagcaccacgcccaggatcgtgtaatcatccggcgtgctcagttcaaattcagtgccaccagggcgggtggcgatttccgcgcttcccagacattggctaccgataaatccctgctcaccgcgcgtcgccggaatgccaaaccagaagctgttcggccagaccaggcagctctgacgcagcgccagaccggtgtattcacgaaaaacctgaatatcatcgagtagaatttccgtaaattcaccatgaaacttgcccggatgcagctgatcgtaaatctgctgccaggcggtaatcgttaaagcatgttcatagacatccgttgtctgtcgttgatgaacattatccacttcgaccttcggcgtgagcttcaggttttcgggtaagggttcatgataaagatggtgcaaattggctgtacgggtctttttcatgatgttaatgccgggtgttgtaggacacccggcacctccgacaggttaatggggcttgagacgataacgactactgcgtttacgtaacgtcccggcagaaaagagctgttcgagcgcatttctggctttttccagcggccagccaaagtgggcagccacttctcctgccgtcattccctgacgtacacttgttaacagcgccaacaactcgtcagcagattccgcgacgataactggcgcgtcgggttcccttacgggttgcttcggctggcggttaaagccagtaaccagccactgggtgtcatcgtctggccgaccgatctccttgcggctgatgacacgcccggtacgcatcgcggcagcacaacctgcgtccagcgccgcacgacacgccgccagatcgccttccaccaccagcgttaagcgaccagggtcaagcacttcgtgactgagcagacgaacgttagctgctttgagcatggcatccgctgcatctatcgcggcgaccatgccgtccacttccagcaatcccagtgcattgatcatcggcaacctccgttacgcacgctggattggattacgcgcgatttccagcactgcatcggtaaaggcgttacaggctgctttacacgctgcctggctaccggttaaaaatgctgcgctgtagttggtttcagacggtggcgggacataggtcgccagctgtacgtcggcagacttcagggctgcatcaatgccataggtcgcttccagcggcggtgccaccagatacgccatcggatcgccaagcgtgatcccggcggtactactgagataagaaccggtacggctaactacatgtgccaggaatgccgtatcttgcgcgtcattagcccactggaaagctgcgccattttcaatatgcgcaatcatcgcatccagacctgcacgcacttccgccgggtttggcccaccaagcataatcagcacttcaccggcagtcggactcgggccgtgtgcagcgcccgcatataggctgcggccatacaccacttccaccatcgcctgcttggtcgcttcatcagcggcaatgtaggtgacgtcatcggagtcggcagaaatcagaccgaggctacgaatatgcggcggcaatttcagttcacgcgcaaaatcggcgttaacggaggcaatcacccgcatagcggtgacagacggtcgaatcaaatctaaagctggcatgatgcctccttatcgggtcatgttgatgccggatgctttctgctccagcatacgtttcgccaaatccacaatgacggctgcggcttcaaccggcggcgtgccgccctggtgaatgttagagatacaggtgcgatcggcctcaacggtggtcgccatacgcgggctgtaaacggcgtagcaggagaggctttcactctgacccaaccccggacgttcgcccaccagcaggatcactactttcgcgccgaggatctcaccgatctgatcttcaatcttcacgcgaccataacgaacaaagaatggtgtaccgactttcagcccggcctgtttcaggcccgccatcagcggtggcaggatctcttcgtagttcacggtgatcgcatcagtactcaggccatcagaaataacgacctgtacgtccggattggcaacacactgcgctttcagcgcttcaacagcttctgcacacaggcggcggcccatatccgggcgagtcaggtagagatttttgtcgctaatttcagagcgtacttccagcaagccctgcgctttcacccactcttccggcacttctttcagtacggtatctttgctacgagagtgatcggccaggaaacgcagcagcgcctgcgtacgtggacgcggaccggcacgaccggtacaaacgcgggccacggtgctgcggcgcagttctgttaatacgtctgcgcgatgcggattttcaacaccaatccacgcttttgcttcagcggaacctaaatccagcgcacagctttcgctggtcaccggtgccgcacagttggtggtggcgcactttgcttcactcggcgcgggggccgcttgtcccatactcgccatcacgctgcgtacaatttcttcaatctgtttttgatccatgatatgttatctccgcgtcatcagaagaacagactcggatcgcccgcccgtttggtcaggcgaccgtttgccataatgcccatgctttccagccagcgttcaaactccggactcgggcgcaggttgagtaactgacgcacagtggcggtatcgtggaatgcggtggtctggtagttgagcatgatgtcatcacccagcggcatccccatgatgtagttgcagcctgcggtggcgagcaggatcatcaggttttcgttgaggttctggtcagcgtcagcgtggttggtataacagcagtcacagcccatagagatgccgctcagcttgcccataaagtgatcttctaagccagcacggataatctggcggtcgttgtagagatactccggcccaataaagccgaccacggtgttgacgataaacggatcgtaatgacgcgccagcccgtagttacgtgcttccatcgttacctggtctgcgccgaagttagcgccagcggatagcgcagagccttgtccggtttcgaagtagaggcagttttccccggcgatacggttgaactccgcgcccactgcgcgcgcttcgtcgagcatcgccagctccacgccaaactctttcagccctttttcgctgccacagatactctggaaaatcagcccgcccggtgcgccacgacggatcgcttcgatctgggtggtgacgtgcgccagtacacagccctgagttgggatgttgaatttgtcgatcacgccatagatggtatccaacacgcggcttaagttttccacgtcgtcagtcaccgggttaacgccgatcaccgcatcgcccaccccgaaggaaagcccttcgtagatttgcgcggcgatactttgcacgtcgtcacgggtgtcatttggctgcaaacgggcgctaaaggtgcccggaataccgatggtggtattggcctttttgattaccggcattttcttcgcgccgtagatcaggtccgcgttggagcaaatcttcgctaccgccgcgaccacttcgctggtcagccctttgcgggtaaaggcaatgtcgtccacgctggtttcatcgctcagcacatactcacgcagttcgctgatgctccagtttttaatctggttgtaggccgtttcgttaacatcgtcctgaatcagccgcgtcacgcagtcatcttcataggcaatcaccggattattgcggatgtccgctacggtcatttcgctcaacacctgctttgccgccacgcgctcctgactgcttgccgctgcgacgcccgccagcacatccccgctacgcagttcgttggctttagccagcacctcttttacatccttaaactgatatacattgccgaacaatgtggtctttagtttcataagtcgttccctcaggaaggaaatgcgagacttttcaccgtcaccggcacaacgcttccgccaaaaagaggcgtaccaatgtcgatatagtcccccgcgcggacaatcacttcgtcaatgactgccaacgggagttgttgtagctgtgggcgcaacaacatgcccagagctttaccaaagtcctgcccggccaccaccagcaggggatgcggattcggaaaacgcgcgacgaaatcgaccaacgcgttgatgaccgtcagtaccgcggcgtaacgcacaggcaggctggcgggaagcgccagcacgtacgcgtcagttttgggatcaagatccagctgaatcagcgcctgttgccaggcccccaccagatccgtttcatcaatcgggatcgccaccggcaaattgcgcagcggcagttgtacgccctcaagccagattgtgctgccagagaggctaagggtatgcgcgcccgcgccaatcaccgtggcgcgcacggtttgcgccggaaactgtacgttcatctcacgcaggcgcggatggtcatgcagcgcagttgccagcagcgggccaatatcggcaaaacagaacgggtcggcgggctggtggcgataacattcgcccacgccgccagaaagcgtaatgatttcgggcgtaacacctgcgggcagcaaaccggtttgcatcaatgcctgcgcgagcggactgagcgttccgtcaatcacttcgacaatcagttctgccatccgccgggtcacctgcaccagctgcgcgccggtcaggctacgggcgtcggtgcctgcaccgaagcactcatccacaatcatctgccccggtttatgagcgtaaaccacgcgcccgtggctgtcggtttccagcaggcgaccaccgacgttgaggcaggcagtgccgctgatttttccggcatcgaacagggcgtagttcgcggtgccaccgccgatgtcgatattcagtacccgacacagccgttgttcagaaagggtttgtgccccggctccgtgaccggcgatcacggattcgaggtgcggcccggcgctggcaacgacaaaatcgcccaggctctgagagagcgccatcaccgccgggcgagcattgcgggttttcgcgctttcaccggtgatgatgatggcaccagaatcaacgctttccggctcaatacccgcagcatgatattgctcgagtattaaggttttcagttccgcttcttttaaaccgccctgtttatcgacaggggtaaagaacaccggactttgccagctaatttcgcgtttaatgaattcgtagcgcggcacctggctcaccgccgcacggttaaccagctccagccgggagaaaatcacctgggtggtggtggtgccgatatcgataccgacgctcaatagctggcgagtgttcacgattgtgcctccgcttcggtttaagtcagctttgtgcctccgcttcggttttagtcgcggtcgcgtcttcttttggcaccagcatcatcgccacgccaatcgccgttacgccgccgatcaacttgccgacaatcatcgggaagatcatggcgttcatgttggcagcggcgaagcctaagtggtcgcccagggcgaaagcagcggaaacggcgaaggcgcagttgatgactttgccgcgggtatccatctgcttcatcatgccgaacatcgggatgttgttggcaagcgttgccaccatgccggctgccgcgatgttgttcatattcagtactttaccgacgctcatcagcggtttttcaaaccagcgagtcagcagcagcaccatcggatacgcccctaacagaacgcaggagatagaaccgataacttcaatggcgcgcatcacctcaccgggtttatcgccaggggccataaagataggatccagaccggggatcagttcccagccaagcaggaatttcactaccgcagcggcaagaccgagggtgatcaatgcaacgaggaatttggcgaagatctggaagccgttgatcattttttccgggatgaatttcagccccagcgccaccagaatcgcaacaatgatcaccgggatcatgttcatcaggatcagggcgaaagtgaattccaccggctggccgttgatctgcacaccggagtacatagcaaccagaccaccagcgatacaaccaatcggaatggtcacaatgcccgccagcacgccgagcgccagataacgacggtcagaaggttcgataatgccgagcgccaccggaatggaaaacacaatcgttggccccatcatgctcccgagaattaacccagagtatagccacgcggctacgtcgccgcccgccagctctttggcgaggaagaagccgcccatatcgcacgccagcagtgttccggcgaacatgcttgggttagcgccgagcatttcgtaaaccggaataattaccggcccgagaacgtgagccagtaccggtgccagcgcggtcataccgaccatcgccaggcccagtgcgcccattgccataaagccttcttcgaactgaccgccacttccttcgatacttttaccgaacttaccgaggaaacgagcagaaccgccgaactggctcaggatcctgtctacggcagctatcagcataaagaacatcatgatgtacatgatgatttcgttaattcccatcgcctttactccctgttagttgttatttattggcggatgcggcgtaaacgccttatccgccctacatgtgcaatcccgtaggctggataagacgcggcaagcgtcgcatccggcaattgcaccgcgccactggcggatgcggcgtgaacgccttatccgccctacatgtgcaatcccgtaggctggataagatgcggcaagcgtcgcatccggcatttattgcgccgctgcgtacaggccgacaatctgctccaggctggcggtacgcgggttactgcgcagacaaatatcttccagcgcggcctgcgcccatgcgccgtaatgcgcagatgtcgcaccaacatcgcccagtcgtttaccaatcccaacttccgcaatcagctcacttaccgcgttaatagcgtcacgatcgtcggattttttagttcgcagtgcccgaccaatctgactaaagcgttcacgacaaaccatccggttaaattccatcaccgttggcagcaacatggcgttcgcgagaccgtgcggaatatgcagcgccgcgcccggctgatgcgccatcgcgtggcacaacccaagacccgcactggaaaacgccattcccgccatacaactagccagcaacatgctctcgcgcgcggcaaggtcgtgaccgtagcccaccgctttcggcaggcttttgccaatcatcgcaatggcaccaatcgccagactgtcggtaaacggtgtagcgttcagggcgctgtatgcttcaatggcatgggttaacgcatcaatgccggtcatcgccgtgacatggctcggcacaccttcggtcaatgcggcgtcgaggatcgccacatccggcatcaggctggcatgggctaacacctgcttgcgcccgctcaccgcgtcgataatcaccgttacattggtggtttcagagccggttccggcggtagttggaatggcaatcagcggcaagcgcggttgcagaacgctggtttcactcatctctgccagcgtgctatccgggttcgtcaccagcaacgtcacggctttcgccgcatccagcacgctgccgccgccaaacgcgatcaccccatcacagccactctcacgcaactgcgccacggctgcacacacgtcggtaatgcacggttcgcccaccggacatggccagagcgtcatggcgatacctttaacggtcaggctacgcgtcagcccggcggtcatccctgcctgatgcaaaaagctgtctgccatcacgaacagatgtttcagcccacgcgtttgcgcttgctgtccgcaactgctcacgctgcccggaccgcaaagcgtcaccggtggaacgctaaatgtttttacccgttgcagattcagggtatcgaacgcctgaaagagcgcggtctgcaattcattttgcatatagcccctccgctttctctcgcccactactggcgatcgccagcggggtcataaacaaactgtgctgcggtaaatgcacctgtaacgccgggaattgtttgcgaaacagttccgccacgcccggttgcatacaagagccgcccgccagccataaatcagtaatgccctgcccttcaatatgccgggcgacaatgtccgccattttttcgtacaccggtttcaccgcaggccaaatctcttcaccgtgaccgcgcttgtactgctccgcctcttccaggctaatacggcgatttccggcgagagtcagagagatgtgatgtccgccggtggcttcatccgcgctgtacgtcaccttgccctttttcacgatggcaatgccggtagtgccgccgccgatatccactacaccggcgttgtccagttgcagcagatccgcaactgcggttggctcatccagcacatggctcacttccagtccggcagattccagcacgttgatggaaatacgcgggtccgtacctggaggaaaactagtcgccgcatggctaaaacgacgaccgaattgctgctcgagcgtgtcgagatggcgacgaacaatggtgacagcgccgaagaaatcccagacgatgccgtcgcgaaccacatcggcccagtcgaggcataccgccactggctgaccgtcgcggtcgacaaccatgctcaccacatcgcaggtgcccagatccacccccagccacagcggagattccgtcgcggcgggcgtctggttacacagcgttgccgccgtttgcagacgtggggtgagccattgttcgtcgtgcgccatctgttactccttaaacaatgcgaaacgcatcgactaatacacagcgacgcagacggacaaacgtacgcgcgctggttaccccttcaccggttggcgtggtgatggtcatggtggtccagccttccccgcccagccccagcccggcaatgcacggtccgttcttaacgaaaatgctggtatcaatagcattcgccatctggttcatgttttcgatgttgcggctgtgcattgccgccgtgtggtggcaaccgccttccagtttcaccgctagcgcaatggcatccgccacgttggcgacgcgcacgacgggcaacaccggcatcatcagttcagtcacggcaaacggatgttctgcggtggtttccacaaacagcaggcgcgtttcttgcggaactttaaggccgattgccgccgcgattttgcctgcgtcgcgaccaacccagtcacggctgacggtgccttttccgcgctcgtcgatatttttcagcaacaccggttgcagctgctgcgcctgttctgcggtcagtttcaccgcgtgctggccttccatcagacgcatcagttcatcggctacgctatcaacaacaatcagtaccttttcgtcggcacaaatgatgttgttatcgaaagaagcgcctttgacgatggactgagcggcacgggcgaggtcggcggtttcatccaccactaccggcgggttgccagcgcctgcggcaatcagacgtttattggtgtgtttacgcgccgcttctactaccgcttcgccgccggttaccaccagcaggccgatacccggaaacttgaacaagcgttgcgcggtttcgatatccggatttgccacagtaaccagtaagttttccggcccacctgcggcaacaatcgcctggttgagcagcgtaatcgcccgctgggagacttttttcgccgccggatgcggggcaaaaatgacgctgttgcccgcggcaatcaggctgatggcgttgttaattacggttgccgccgggttagtggaaggcgtcacgctagccaccacgccccagggtgcgttttcaattagggtcaggccgttgtcgccagtcagcacttgcggagagaggcactcaacgcctggtgtgccgcgcgcctgagcgacgttttttgcaaatttatcttcaacgcgccccatgccggtttcactgacggcaagttccgctaaatctctggcgtgtttttcgcctgcttcacgaatggcagcaatggctaactggcgcattgccacgctttttaacccttgctgggcgactttggctgccgcaacggcgtcatccagggacgcgaaaacgcccatctcatgaacggcggcggacggcgtgtcactgctttgcattttcagcagtaccgctttcaccacctgttcaatatcctgttgattcatgatgttctgccttatttgtggaaaattacctgaccgccagacaccacctcatcgacaatgccaatcacgcacagatcgaccggactcgtttcgcttttatgcgcctggcgggcggaactgccactcaccagtaacacccactccccggttcccgcgccaatattgtcgatggcgacggcgcattgcccgtcaggattaccttgtggatcaatcatttccaccatcagcaatttgtcatgcgccagtccgtgatggcgtacggtacaaacaatttgtccagtgacgactgccagtttcatacccgcctccgtggcgtatttcaggtaaaagctccccctaccctccgcagaaggtaaaatgaaaaaggagagagcgtgacgcccgaatcgacgtcacacagggtgattacaggttgctgctatcgcctttcaggccgatcgggaagacttcttccaggtcgccgtgcggacgcgggataacgtgtacagataccagctcgccgatacgctgtgccgctgcggcacctgcatcggtcgcggctttacaggctgcaacatcaccacgaaccatggcagtacacaggccgccgccaatctgcttaacaccaaccagcttgacgcgcgcagctttcaccatcgcgtcagaagcctcaatcagtgcaaccaggccccgggtttcgatcattcctaatgcttccattgtgctttcctctttatcagggtccagaacgggaccgttcattcaaccagtgtttgtaaactgctttcgcggttcacttctgtctgacgcggcacagctgccaccagcgccagctcgataatttcctgcacgctacaaccacgagagagatcgtgcatcggcgcggcaagtccttgtatcagtggcccgacggcacgatatccgccgagtcgttgtgcgattttgtaaccaatatttccggcttccaggctcggaaaaaccatcacattggccttgccctgtagcgggctggcaggcgctttttgcgccgccacttccggcacgaaggcggcgtcaaactgtaactcgccatccaccaccagctttggtgcgcgctcacggacgatttctgtcgcctgctggacgttagcaacacaggggtgacgggcgctaccattgctggaaaagctcagcatcgccacgcgcggctcttctccggtgatggcgcgccaggtttcggcactggcaagcgcgatatccgccagctgcgccgccgtcggctgtggcaccacgctgcaatcggcaaagcccaacgccgggccgctgtactgtggcaacatcaggaaaatggaagagagcgttttacagcctggctgcaagccgataatgcgtaatccggcacgcagcacatttgccgtggaagagaggttgcccgcgatacagacatccgctttaccggcgctgaccattgctgcggcgaacatcagagggtcggtaagtttttccagcgcatccggcggcgttttttcgcccgcgcgggccagccagcgatgagcaaattcttcccgcattgcgaggttgccatgcggatcaatcacctgtagcccgtccatcgccacgccgtgactgagcgcaaactgacgaagttcaaacggattggcgaccagaatgggcgttgccagaccttgttgatgtaaatattgcgcggctttcagcacacgttggtctaacgcatccggaaaaaccactctggcgggcgctcgcaacgccagttcacgacaacgttcaataatcattgcgtttcccccagtcgttgttggatctgcttcaccgttagcggctgcttcgttacgctcaggatcatcatcacgtagaccgtgctgctaaggcggttcagcgcctgcaaaatgtccgggcgtaatacttcaaagctgcgggtgataaagacctgcgccgctacggtttcggtttcccgcactttggtgcgtagcagattgagcaacgcagcatcgcgcccgtggctggcttccggcaccagatgatcgtggtcgagatagcgcagcggctgatgagaaagccgatgcagatcttcgtcagaaagcccgacaatcgcctggcagcccagcggttcccccagcgcatcggcgcgcataatgttgccaagacggctacggatatccgccagccacggctgccacggttccgccagttcaatttgcagccacactgccagcgcaatggtgctgtcgagaaccgcgcgaaaacccagacgcggatcgcttttggcgaccattttttccgcgctcaggtgagtcagcgtatccggcttttttgccaccggctggcgacacagttcgcagcacgcctgcggatgttcatcgctactggtcagcccatgaacgggctgcggctgctgctgttcatcgtcaacaaacaggcggccctgctcgtcaataaacttgatgcgcagatggcggctttccagcaactcccgggcagagggcgtcaggcgactgtccgcagggagatggatctctgcgccttcgctgagcgtatggttcgctcttagccatgcttcggtgatgaaatctttcatagggattgccagttagccggccaggcgacatacaggaatttcacgctggatgtcgtaccaaattcgatgctggagcctttcgggataaacatcacgtcgcctgctttggcgatcatggtttggccttcgtggcgaacatgcagctccccttccagcaccatgtcgatttcgtcgtagttcagggtccacgggaagaatgcgttctcccactgcataaaaccggcggccatgctgctgccgtcgtctccggtcacaagatcagtcaagcccacgcaatgcggctctgcgccgtcgaaacgaccaaacttgacgctactgccatcaatcactttgatgccgcctttgccggtcacgcttttgaagctcggctgcattgcgccctgctccaggctctgtttttccttcatcactttttccatcagctgtgcgaccaggctttcggtaaactggccttccggcagctgggcaatgatggtttcgcggatgcgctggctttcggttttgtcggctggcacgctggcgggcacggacgccgttaccgggatgctttcatcacattcggtgatggtaaaacccagtagatccgccacttcacgggcttccggggtaataatgctggcgcgcagaaccacggacattgcctgttcgccgcgcgcgtgtgcttcacgaatatcattcgctgtgatgagttttttcacctgcttcctcctgtttggtgagagatgccagataatccaccagttgctgcacgctttgcgggtcgtggctgtttagctcgaacatcggctcttcgaaacccgtctcaagcaataactttcgcgttgcggcgacgtcagcatctggcatgtccgttttactgatgacggcgatttgccgtttgctgacgccaatatccagcaacccggcaggcaaccgactttccgggtcatttgcgccatggacatagatcagcatgtctacatcctgtagcgtggtaattaaggcgtgataccagcggggatggttaaaatattcacccggcgtatcaatatcgcccttatcattaaattccacggcctgtgtttttctggcgagggtataattcccctgcaacgcattaaataacgttgtttttcctgccccgacgctacccacaaacgcaattcgtttcatgaatgcctcgtattaacttttggtcatttcacaaagcgtataatttaataagcgacctaaaccgctgacggtttgacttaacgcttcttctactgcgcccacgctgccataaatcaccaatgcaccgctgaatcggtcgagaaaaccgatatgcacatcagcggctttcagcgctaaatcaccggcgatcatcgccgtttcgccgggagttagcgtcataatgccaattgcgcccgcatccggaacgccgattttcttcgccagttcctcaccgggatgcgcgatgagatgcgccagtgtgacctgtttgccgggcacaaattcctgaatgatgcgttctttatccatgagtcgccgcctgtgaaaaactttcgtgtatcgtgacaatttttcgtcagagtaaataacaaaattcggcaagcgcgtttaaaaggtgaggtagatcactaagaatggagagatattcgctgtggtgcataaactttcatatgcaacgcatgaatataaataaaataatatcgagatattatatagactgcttttttttattattcgcaaactcagtaataagctttactaatatattgcagctaaactgcttaccctgaatattcagggtaagcgtgagagttaaaaaaaattacagcggttgggtttgcgcttctaccacggccagcgccaccatgttgacgatacgacgcacgcttgcgatcggcgttaacacgtgaaccggtttcgccacacccatcagcaccgggccgacagtcacaccttcgctgctggaaacacgcagtaagttgtaactaatgcgggcagcttccatgttcggcatcaccagaatattggcggaacctttcaaagagctgtccggcatacggtcgttgcgaatcgcttccaccagcgctgcatcgccgtgcatttcaccatcaatcatcagttctggtgcacgttccctgaccagttccagcgcctgacgcattttgctgctgctcgggcagtcagaagaaccaaagttggagtggctcaacaaagcaacgcgcggctcaataccaaaacgacggacagtttctgccgccatcaaggtgatctccgccagctcttctgcatccggttcatcattaacatatgtatcggcaataaaggtgttaccactcggcagcagcagcgcgttcatggcacctgcggtgtgaacgccatcgcgataaccaaagacatttttcaccacgctaaaatgttcatgataatcacccaccgtaccgcaaatcattgcatcggcttccccacgctgaaccatgatcgcgccgatcactgtcgggttactgatcagcgcccgctgcgcctgttcctgagtgacgccgcgacgcttcatgatctggaagtattcggtccagtactctttaaagcgcggatcggattcgttattgacgatctcaaaatcaacgcccgctttgatctgcaagcccagtttctgaatgcgcatttcgatcacgttcggacgaccgataaggatcggtttcgccagtcccagcgttaccagttcctgagtggcatgcagaacgcgcgcctcttccccttccggcagaacaacgcgcttcggcgctttgcgagcctgggagaaaatcggcttcataaacaggttggttttgtaaacgaactcagtcagcttgtcgatgtagacgtcgaaatcagcaatcggacgagtcgccacgccgctctccatcgcggctttagcgaccgcaggagcgatcttaacgatcaagcgcggatcaaacggctttggaatgatgtattccggaccaaagctcagatcctgatcgccatacgcactagccaccacttcgctctgttccgcatgggcgagttctgcaatcgcacgtaccgccgccagtttcatctcttcgttgatggcggttgcgccaacgtccagcgcgccacggaagatgaacgggaagcacaggacgttgttcacctggttcggatagtcagaacgaccggtgcaaatgatggcatccggacgcacttctttcgccagcggcggcagaatttccggttccgggttcgccagcgccaggatcattggcgcacgagccattttcttcaccatttcctgggtcagcactttcgggccggaacagcccaggaaaatatccgcgccttcaatcacatcatcgagggtacgtttgccgtcatccaccaccgcatatgcggctttggtttccgccatgtttggctcacggccctgatagataacgcctttactatcgcaaaccacgatgttatgtttttgcagacccagcgctaccagcaggttcatacaggcgattgctgcggcacccgcgccggaaaccaccatccgcacgtcggagatgtttttctccaccacgcgcaagccgttgaggatggcggcagtgctgataattgccgtgccgtgctgatcgtcgtggaataccggaatattcatccgctcgcgcagtttctgttcaatatagaaacattctggcgctttaatgtcttcgaggttgatgccgccgaaggttggttcgagcgcggcgacaacttcaataaatttgtccgggtcgagttcgtcaacttcaatgtcaaatacatcaatcccggcgaatttcttaaacagaacgcccttgccttccatcaccggtttgcctgccagcgcgccaatgttgcctaaccccagcaccgccgtaccgttagagatcaccgccaccaggttacctcgggcggtatatttgtaggcttttaacgggtctttttcgatttcaagacaaggtgcggcaacgcctggactgtaggccagcgccagatcgcgctgtgttgccagaggcttggttggagaaacctggattttccctggaactggaaattcatggaaatcaagtgcactttgttttaactggtcatccatttggttgttcctttcacgtaacgttcacaaataaagtgtgtgggcaacagcccctgcccacaacgtggcgcacattattaccctgccggagtctacagactttgagcaagtccaaactctcaccattaatataatgttttggtaataatcctataacactgatgttacctgcttaatccagcaataccatgcctgtctgctatgcttttttgatgcgtttagcgaaatttctcagaagtgtgaattaacgcactcatctaacactttacttttcaaggagtatttcctatgaacgagttagacggcatcaaacagttcaccactgtcgtggcagacagcggcgatattgagtccattcgccattatcatccccaggatgccaccaccaatcctagcctgttactcaaagctgccggattaagtcaatatgagcatttaatagacgatgctatcgcctggggtaaaaaaaatggcaagacccaggaacaacaggtggtcgcagcgtgtgacaaactggcggtcaatttcggtgctgaaatcctcaaaatcgtacccggtcgcgtgagtacagaagttgatgcacgcctctcttttgataaagaaaagagtattgagaaggcgcgccatctggtggacttgtatcagcaacaaggcgttgagaaaagtcgcattctgatcaagctggctagcacctgggaaggaattcgcgcggcagaagagctggaaaaagaaggtattaactgcaacctgacgctgctgttttcttttgcacaggcacgggcctgtgcggaagcaggcgtttttctgattagcccgtttgtcgggcgtatttatgactggtatcaggcacgcaagccgatggacccgtatgtggtggaagaagatccgggcgttaaaagcgtgcgcaatatctacgactactataagcaacaccactatgaaaccattgtgatgggcgcgagcttccgtcgcaccgaacaaatcctcgccttaaccggctgcgatcgactgactatcgcaccgaatttactgaaggagctgcaggaaaaagttagcccagtggtacgtaaattaatcccaccttctcagacgttcccacgcccagctcccatgagcgaagcggagttccgttgggagcacaatcaggatgcgatggcggtagaaaaactgtctgaaggcattcgtctgttcgccgttgatcaacgcaaactggaagatcttcttgccgccaaactataaaccagccacggagtgttatatgtcccgaaaagaccttgccaatgcgattcgcgcactcagtatggatgcggtacaaaaagccaactctggtcatcccggcgcgccgatgggcatggctgatattgccgaagtgctgtggaacgattttcttaaacataaccctaccgacccaacctggtatgatcgcgaccgctttattctttccaacggtcacgcgagcatgctgctctacagtttgctacatctgaccggttacgacctgccgctggaagaactgaagaacttccgtcagttgcatagcaaaaccccaggccacccggagattggctatacgccaggcgttgaaaccaccaccggcccgcttggacaaggtttggcgaacgccgtcgggctggcgatagcagagcgtacactggcggcgcagtttaaccagccagaccatgagatcgtcgatcacttcacctatgtgtttatgggcgacggctgcctgatggaaggtatttcccacgaagtctgtagcctggcaggcacgctgggactgggcaagctgattggtttttacgatcacaacggtatttccatcgacggtgaaacagaaggctggtttaccgacgatacggcaaaacgttttgaagcctatcactggcatgtgatccatgaaatcgacggtcacgatccgcaggcggtgaaggaagcgatccttgaagcgcaaagcgtgaaagataagccgagcctgattatctgccgtacggtgattggctttggtagcccgaataaagcaggtaaggaagaggcgcacggcgcaccactgggggaagaagaagtggcgctggcacggcaaaaactgggctggcaccatccgccatttgagatccctaaagagatttatcacgcctgggatgcccgtgaaaaaggcgaaaaagcgcagcagagctggaatgagaagtttgccgcctataaaaaggctcatccgcaactggcagaagagtttacccgacggatgagcggtggtttaccgaaggactgggagaaaacgactcagaaatatatcaatgagttacaggcaaatccggcgaaaatcgctacccgtaaggctagccaaaatacgcttaacgcttacgggccgatgctgcctgagttgctcggcggtagcgcggatctggctcccagcaacctgaccatctggaaaggttctgttagcctgaaggaagatccagcgggcaactacattcactacggggtgcgtgaatttggcatgaccgctatcgccaacggcatcgcgcaccacggcggctttgtgccgtataccgcgacgttcctgatgtttgttgaatacgcccgtaacgccgcgcggatggcggcactgatgaaagcgcggcagattatggtttatacccacgacagtattggcctgggcgaagatggtccgacgcaccaggctgttgagcaactggccagcctgcgcttaacgccaaatttcagcacctggcgaccgtgcgatcaggtggaagcggcggtgggctggaagctggcggttgagcgccacaacggaccgacggcactgatcctcagtaggcagaatctggcccaggtggaacgtacgccggatcaggttaaagagattgctcgtggcggttatgtgctgaaagacagcggcggtaagccagatattattctgattgccaccggtagtgagatggaaattaccctgcaagcggcagagaaattagcaggagaaggtcgcaatgtacgcgtagtttccctgcccagcaccgatattttcgacgcccaggatgaggaatatcgggagagcgtgttgccttctaacgttgcggctcgcgtggcggtggaagcaggtattgccgattactggtacaagtatgttggtctgaaaggggcaattgtcgggatgacgggttacggggaatctgctccggcggataagctgttcccgttctttggctttaccgccgagaatattgtggcaaaagcgcataaggtgctgggagtgaaaggtgcctgatggtgattgccggatgctgattgccggatgcgacgctgacgcgtcttatccggcctacagcgtcttatccggcctacatgtcccgccattttgtttaacgggtgatccacaacgtgggccaggcgtctggcccatgccagttatcgcaggtgggttctgcggcgtaacgcaccaggcgaaaacgctgaccgtcaaagcgccagcgcgcctgaatgccacaatcgcttaatccgcgccctttcgctaaggtcaccagttcacggcttttctcatcaaatgttgcgttcatcagttccagttcattcgtctcctgaccgttgttgaacggcaaacgcaaccgaaccgggcggctagctagtggctttttacggctcacaatccatgccaaatcaatggtgttataggcccctgcctcacagctaatcatcatcagcgctttatcatcagtcagcgcagtgacattcacctcacgacgcaatggatcaaggctgcagcgcagaccattcatccgccagtttccataatccagcaaatcgttgcgttcttcgagactgagtggcgtcggcgttgggttaaccaccgcgacctctttcagcgcaggcgcgggcggtacgctgagcggcggttcgtcccctttcttgatccacgcggtttcactgccaacgcgcttttgctgagcatcaataaacaacaacgctgcttttaagccactcagagaaatggtctgatcgccatcgcgtaaggtgattgccttcccttcctgaatcatctgcaaaaacgcggtgatggttgccgtatcatcggttactaataaccatggactaatccgccacttgtcaccacttaacgccaacggctcgccatctaacagcagccgtggcgctatctccccttcactcgcctccgggctcttcaatccgccgcgctcaatacgtaaaacggcatcggtatgcgccccggcgctgcggctcagggtcatcaccagtccattatgatcgcccgtattacgcgccacgcagaaattttggttattacaggtgacctgccagtcggaaaacgcccgttgcgctggtgccgcccacaccaaagacgtcggcaacaaagcgaaaaaaaagagaaggaaaatgcgatagcgcatggacggtacgaccccagaagttcaaacaaacagcacaagtcgtatcttcgttgcgcaggtagcgcggctcaatcggatttgtcggattgagccaataataaacaacgaaatattattgttatttttcagtccattaaatgactcgtttgcaaatagttaagcaataacaccgtcttaccgtcacgtatctcgccggttttgatcatctccagcgcctggctgaacggcagctcgagcacttcaatatcttcatcttcgacaccgccaccggcgttagcgcgctgattgtcactgtattcggcgataaaaaagtggattagctcagtcacaccgcctgggctcatatacagttcaaataatttgcgcacttcacccacttcatagcccgtctcttcaatcgcttctttgcgaatacacacttccggttcgtcgttatccagcagcccggcgcagctttcaatcagctgcccgctttcattgccattaacccaggtagcgacacggaactgacgaatcagaaccacggtctttttcttcgtgttgtacaggaggatcgtcgcaccattgccgcgatcgtacacttcacgtttatggcggataacttcgccgtctttgcgcgtgagatcgtaagtaatgttgtgcagggtgaaatagttatcggagagaattttgtctttaatgagggtgatttgttgcgtcataccgactccacagcgcgaaatgaacaattatcttacgctgtgaagtcgggtttgtctgcgcaggctatcagtgagatttgacactttttacccccagccagtcaataatcccctgtgccgcatgacgtccttctgccattgcggtaaccaccagatccgcaccacgcacggcgtcaccaccagcgaagattttcggattggtggtctggtaacggtactggctttccacatccgcgatgatgcggccccatttgtctaccgttacaccgtggctctccagccacggcatcccgtgcggattgaagccaaacgccataatcaccgcgtcggctggcatgacaaattcactgccttccaccggcactggacgccgacgcccctgggcatccggctctccaagacgcgtgcgcaggaaacgaatcccgcagacgtgaccttgttcattcagctcaagcgccaccggctggacgttaaattcgaagttggccccctcttcgcgggcgttcttcacttctttcttgctgcctggcatgttagcttcatcacgacgataagcgcaggtgacgttactcgcgccgtggcgcagtgcggtacgcacacagtccatcgcggtgtcgccgccgcccagtaccacgacgttaagtccggcggtattgataaacggctcttccggtagctcttcgagccccatcacctgtttagtgttggcaatgaggaacggcagcgcgtcataaacgcccggcgcatcttcattgggtaaacccgctttcatggaacggtaagtgcctacgccaacgaagaccgcgtcgtattgttccaaaaggctatccaaagagacatctttacccacttcacaattgagttcgaagtgaatccccatcgcgctgaagatttcccgacggcgtgccagcagggatttatccagtttgaaagaaggaatgccgaaagtgagcaagccaccgatttctggatggcgatcgtacaccgtcacccccacgccattgcgggtcagaacatccgcacaggccagccctgccggacctgcaccgataatcgccacccgcttgtccactttggtgacatggcttaagtcaggacgccaacctttcgccaacgcctgatcactaatgtagcgttcaatgttgccgatagttaccgcgccgtgctcatcgcgaatagtacaggcaccttcacacaaacggtcttgcggacaaacgcgtccggtaatttccggcagggtgttggtctggtgagaaagctcgacggcggcgtcgatgtttccggctttcaccagttcaatccactgcggtatatggttatgcagcgggcaggtccattcacaaacgctgtgctcgccgcacttaaggcagcggctggcttcccgttgtgcctggtcggcgcgaaatggcagataaatttcatcaaaaccggttttgcgcgcttcaatcgccagtttatccggctcgccacgcgcgggcgttgcctgcatttgttcgactttactcattaccggcatttcttgcgccgcggtactggcatgccacggttgatgttcctgacgcgcggtgcgcaagcggcgggatttcgccatgccggagagtgcgacgtcagtgaccagttgcagcgcgtccgccgggcaattctcaacacaggcaggaccgttttcgcgccccgcacaaaggtcgcatttatgcgccgtggcttttacttttcctgccgcgacgggtgtcaggacgatttgcatcgtaccaaaaggacaggccaccacgcaggatttacagccaatacacttttgctgattgacctgaatgctgtcatcaacgtggctgattgcgccattagggcagctacgggcgcagggcgcatcttcacaatggtgacaggtcactgcactacgttgctgttgatgtttgataaccgtaattcggggatgaaaatggtgttggctcaggacatgttgctcatcattgtgagccatgacacaggcgatttcacaagcatgacaacccagacattgctgactgttggccataataaaacgattcataacgaccttcttttttggttgtaaaaaccttattctttatatgagtgttgttattacccgacttacaggggaatcggcaatgttcatgtgcccagaataagtaactatttcgctataaactgtggcagatcaaataatcccatcactgactaaattgcgtttcagcgaactggaacattaatgattttttgtggagaagacgcgtgtgattgttaaacgacccgtcagcgccagtctggcccgggcctttttttacattgtgctgctgagcattctttccacgggtatcgctctgctaactctggcgagcagtttgcgcgacgctgaggctatcaatattgccggaagcctgcgtatgcagagttaccgcctgggctacgacttgcaaagtggcagtccacaactcaatgcacatcgccagttatttcagcaggcactgcatagtccggtattaaccaacctcaacgtctggtatgtgccagaagcagtaaaaactcgctatgcgcatctgaatgccaactggctggagatgaataatcggctcagcaagggcgatttgccgtggtatcaggccaatattaataattatgttaatcagatagacctgttcgtactggctttacagcactacgctgaacgcaaaatgctgctggtggtggcgatttccctggctggcggcatcggtattttcacgctggtcttttttactttgcgccgcatacgccatcaggtggttgccccgctgaatcagctggttaccgccagtcagcgtattgaacacgggcagttcgacagcccgccgctggataccaacctgccgaatgagcttggtctgcttgcaaaaacctttaaccagatgagcagcgagctgcataaattgtaccgtagcctggaagcgagtgtagaagaaaagacccgcgatctccacgaggccaagcgtcgtctggaggtgttgtatcagtgtagccaggcgctgaacactagccagattgatgtgcattgtttccgccatattttgcagattgttcgcgacaatgaagcggctgaatatctggagttaaatgtcggtgaaaactggcggattagcgaagggcaaccaaacccggaattgccgatgcagattttaccggtgacaatgcaagagacggtttacggcgaactgcactggcaaaatagtcacgttagtagtagtgaaccgctgcttaacagcgttagcagcatgctgggacgcggtttgtactttaatcaggcgcagaagcattttcagcaattattgttgatggaagaacgtgcgaccatcgcccgcgaattgcacgacagcctggctcaggtactttcttacttacgtatccagttgacgttactgaagcgtagcataccggaagataacgccaccgcacaaagtatcatggccgatttttcccaggcgttgaatgatgcttatcggcagttacgcgagctgttgactactttccgcctgacgctgcagcaggcggatctcccctccgcattgagggaaatgctggatacgttacaaaatcaaaccagcgccaaactgaccctcgactgccgtctgccaaccctggcactggatgcgcaaatgcaggtgcatttgttgcaaattattcgcgaagcggtgctgaatgcgatgaagcacgccaacgccagcgaaatcgccgtcagttgcgtcaccgcgccggacggcaatcacacggtttatatccgtgataacgggattggtatcggtgaaccgaaagaacccgaaggtcattatggtctgaatatcatgcgcgaacgcgcggaacggctaggtgggacgctgacttttagtcaaccttccggcggcggcacgttagtgagtattagctttcgctctgcggagggtgaggaaagtcagttaatgtaatgcctcctactgaccaaagaatacttgcacttaaggttcagtataaaagggcatgataatttacattaactcctttttttctccacgattggctcgtaccttgccgctacagtgaagcaagtcaagcctacaacgatacgcagaaacacgaggtcctcttttaatggcgaatttctttattgatcgccccatttttgcctgggtgctggcaatcctgttgtgtctgacaggtaccctggcgatttttagtttgcccgttgaacaataccccgatctcgcgccaccgaatgtgcgagtgaccgctaactatcccggcgcaagcgcccagacgctggaaaacaccgtgacccaggttatcgagcaaaatatgaccggcctcgataatctcatgtatatgagttctcagagcagtggcaccggtcaggcatctgtcactttaagttttaaagcaggcaccgatccggacgaagccgtgcagcaagtacaaaaccagctgcaaagtgccatgcgaaagttaccgcaggcggtgcaaaatcagggcgtgacggtgcgtaaaaccggcgataccaacattctgaccattgccttcgtctctaccgatggtagcatggataaacaggatattgctgattatgttgccagtaatattcaggacccgttaagccgcgtgaatggcgtcggggatatcgatgcctatggtagccaatattccatgcgtatctggctggacccggcgaaactcaacagtttccagatgacggctaaagatgtcactgatgccattgagagtcagaacgcgcagattgcggttgggcaacttggtggtacaccttccgtcgataagcaggcgctcaacgccaccattaacgcccagagtctgctgcaaacaccagaacagttccgcgatatcaccttgcgggtcaatcaggacggcagtgaggtaaggctgggcgatgtcgccaccgtcgaaatgggggcggagaaatacgattatcttagccgcttcaatggtaagccagcctccgggctgggggtaaaactggcctccggcgctaacgaaatggcgacagcggagctggtgctcaatcgtctcgacgagctggcgcagtatttcccgcatggactggaatacaaggtggcgtatgaaaccaccagctttgttaaagcctccattgaagacgtggtgaaaacgctgctggaagctatcgctctggttttcctcgttatgtatctgttcctgcaaaacttccgcgccacgctgatacccactatcgccgtgccggtggtgttgatgggaaccttctccgtactttacgccttcggttacagcgtcaacaccttaaccatgttcgcgatggtgctggcgatcggtctgctggtggatgacgccatcgtggtggtggaaaacgtcgaacgtattatgagtgaggaaggactcactcctcgcgaagccacacgtaaaagcatggggcagatccagggggcactggtcgggattgcgatggttcttagcgcggtatttgtaccaatggccttcttcggcggcaccaccggtgccatctatcgccagttctctattaccattgttgcggcgatggtgctgagtgtactggtagcgatgatcctcactccggctctgtgtgccacactacttaagccactgaaaaaaggtgagcatcatgggcaaaaaggcttttttgcctggtttaaccagatgtttaaccgcaacgccgaacgctacgaaaaaggggtggcgaaaattctccaccgtagcctgcgctggattgtgatttatgtcctgctgcttggcggcatggtgttcctgttcctgcgtttgccgacgagcttcttaccgctggaagaccgtggcatgtttactaccagcgtacagttgcccagcggtagtacgcaacaacagaccctgaaagtcgttgagcaaatcgagaaatactacttcacccatgaaaaagacaacatcatgagcgtgtttgccaccgttggttctggccctgggggtaacgggcaaaacgtggcgcgaatgtttatccgcctgaaagactggagcgaacgcgacagtaagaccggcaccagctttgccattatcgagcgtgcaacgaaggcgtttaaccaaattaaagaagctcgcgttatcgccagcagcccgccagcaattagcggtcttggtagttctgcaggttttgatatggagttgcaggaccacgctggagcgggtcacgatgcgctgatggcagcacgtaatcagttgctggcgctggcggcggaaaacccggagctaacccgtgtgcgccataacggcctcgacgacagtccgcagttgcagattgatatcgaccagcgtaaagctcaggcgctgggcgttgctatcgacgatattaacgacacactgcaaaccgcctggggtagcagctatgtgaatgactttatggatcgcggtcgcgtgaagaaagtctatgtgcaggcagctgcgccgtatcgcatgctgccagatgacatcaatctctggtatgtccgaaataaagatggcggcatggtgcccttctctgctttcgcgaccagtcgctgggaaacaggcagcccgcgtctggaacgctataacggttattctgcggttgagattgttggggaagccgcaccgggggtcagtaccggtacggcgatggatattatggaaagcttagtgaagcagctgccaaacggctttggtctggagtggacggcgatgagctatcaggagcggctttccggcgcgcaggctccggcgctgtacgccatttccttgctggtggtattcctgtgtctggctgcgttgtatgaaagctggagcgtgccgttcagcgtaatgctggtcgtgccgctgggggtaatcggcgcgctgctggcaacctggatgcgcgggctggaaaacgacgtttacttccaggtgggcctgttaacggtcattggtttaagcgcgaaaaacgccatcctgatcgtcgagtttgctaacgagatgaaccaaaaaggccacgacctgtttgaagcgacgctccacgcctgccgtcagcgtttacgcccgattctgatgaccagcctggcatttatcttcggcgtattgccaatggcaaccagcacgggtgccggttccggtggtcagcatgcggtgggtactggcgtaatgggcgggatgattagcgccactattctggctatttacttcgtgccgctgttctttgtgctggtgcgccgccgcttcccgctgaagccgcgcccggaataagcaataaaaaaggcgacatgccaatgtgtcgcctttttcaactttccgattaagaacctgctcagcgggttcttgctgtttgtactttgtctcaggaattacttacgaagcataacttcgataaagtctttccagttccccagttcacgttcaatcataacaacctctcttataattatgggtattctacggaaacaatataccgtggtgaagctaatttactcgattgctgcgatgactacctccgggggacaaatcttatgtaaatactatggtcctgcggtgatgatttgtatgtgatacacagcaacatttcgagatattcatacggcatctaatactgatttaattctggttaaaatacagacagataacaagatgaatattcttaatgtttacgttaaaaatgtttaatattatttaatagttgttaatttgaatacttcgataatgttatatttcctgataatcatttgcaggcaaaatgttttcacccttaaatgagtatttattctcataaatcgaaaaaggattcattatggttacactttacggtatcaaaaattgtgacaccattaaaaaggctcgccgttggctggaagccaataacatcgactatcgttttcatgattaccgcgtcgatgggctggacagcgaattattgaacgattttatcaacgaattaggctgggaagcgttactcaacacccgtggtacaacctggcgtaaactggacgaaaccacccgcaataaaatcaccgatgcggcctctgcggcggcattaatgactgaaatgcctgcaattatcaaacgtccattgctctgcgtgcccggtaagcctatgctgctgggtttcagtgattccagttatcagcaatttttccatgaggtgtaatctatgagctgcccggttattgagctgacacaacagcttattcgccgcccttccctgagtcctgatgatgcaggatgccaggctttgttgattgaacgtttgcaggcgatcggttttaccgttgaacgcatggactttgccgatacgcagaatttttgggcatggcgtgggcagggtgaaacgttagcctttgccgggcataccgacgtggtgccgcctggcgacgccgatcgttggatcaatcccccgtttgaacccaccattcgtgacggcatgttattcgggcgcggtgcggcagatatgaaaggcagcctggcggcgatggtggtggcggcagaacgttttgtcgcacaacatcccaaccatacggggcgactggcatttctgatcacctctgatgaagaagccagtgcccacaacggtacggtaaaagtcgtcgaagcgttaatggcacgtaatgagcgtctcgattactgcctggttggcgaaccgagcagtatcgaagtggtaggtgatgtggtgaaaaatggtcgtcgcggaagtttaacctgcaaccttaccattcatggcgttcaggggcatgttgcctacccacatctggctgacaatccggtacatcgcgcagcacctttccttaatgaattagtggctattgagtgggatcagggcaatgaattcttcccggcgaccagtatgcagattgccaatattcaggcgggaacgggcagtaacaacgttattccgggtgaactgtttgtgcagtttaacttccgcttcagcaccgaactgactgatgagatgatcaaagcgcaggtgcttgccctgcttgaaaaacatcaactgcgctatacggtggattggtggctttccgggcagccatttttgaccgcgcgcggtaaactggtggatgcggtcgttaacgcggttgagcactataatgaaattaaaccgcagctactgaccacaggcggaacgtccgacgggcgctttattgcccgcatgggggcgcaggtggtggaactcgggccggtcaatgccactattcataaaattaatgaatgtgtgaacgctgccgacctgcagctacttgcccgtatgtatcaacgtatcatggaacagctcgtcgcctgatgagtggttctgcaagaggaaataagcatggactggctggctaaatattggtggattctggtgattgtctttttggtaggcgtcctgctgaacgtgattaaagatctcaagcgcgtcgaccataagaaatttctcgccaacaagccggagcttcccccgcatcgtgatttcaacgataagtgggacgatgacgacgactggccgaaaaaggatcaaccgaagaagtaagctgagtgctcaaccgtaggccggataaggcgttaacgccgcatccggcaatggtgaacgatgcctgatgcgacgctcacgcgtcttatcaggccaggtaatctgtcttttacatcatttcaatcacatcatcatcgccaggcttaccgccacttagcgcttcgtcgaaataatgtttcggaatggtataacgcaagtgatccagggcaaattgcatactgcgattgtcgatcgcatggcctaaatcctccacgatatccagcgtcacgtcaccaccggcactgattaacgcttcctgcgccgcaaccgcatgcgccagatcgataaccggatcttcaccgccatgaatcaggtgaattgtcgtggctgtagacgcagtttccggcaggctcgcatagcgtccgttaaaagcaatgacgcgactagcaaggcccggttcggctttaatgctctccagcaccataatcgcgccttgagagaaaccgatgagcgccgtggcgttagcccctactccgctctgtttctgccagtagcgcaccgtttcaataaacgtcggcatgatcgcatccacacgcgcctggcgattatcttccgtaataccctgcacgctaaaccactgacgccccgccggattaccgctcggctccgcgccaccgacactcaccaccagcgcatcaggaaacagcggtgcaaaccagttgcctatttcccccattgccaccgggttatccccgacaccgtggaaaagcagtaacaactgttgcgcaggtttatccgggctttgaacaacaaaatggtcatgtttcatggcgaactccttaactgatgtcattaattttacgccgctgactcacaatgaccatgagataaaattgaaggagtcagtgaaataattgccattgcgttatgcgatcgcgcagacgctcagtgcgaacatcattaagtgcgaacagcgcctgcgcggcctcttcccgctgacggaccagtaacatcttgcggccactaagtttaagtgtggtacataactgcgcatcactggcgtttttctgtaaacgcccacgcagcgccggtaatgccagttcactggtttgtaacagacgcaataagcaacctaagctcgttaatagcggacgatgagcgaaagcaaaaccggccagttcaagccagtcgtcgtcagaaaggacggcatcgtttagtggatcaacaggaagcgtttcgccattccactgcgcgagagcttgcgcatcgcgacgtaaacggtaatgctcacgttcagccagctgtttacccgcatcactcatcggtaacagcgccatcgccgtatagcaaccgctgctggcttcccgatgattacccatccgcaccagcacaaaaccgcagcgttgccagaaacgccataactccccggtgtaaccaaaactcacgctaagatagtcgaggtcttgcgtatattgcaaagcaccagcaataagttgccgccctgtgccttcccgctgacgagccggatgaactgctatccggctgacccgccgtccacgcaatgtcgccgccagtggattgttgccgtgcgccgccaggctctgggccaccagattaccccgcgggcgacgaaaacctgcccataccgcctgactgagttgttgagataatccaccctcatccaccagccacagcgccccggcaatctcgttttcgccagccgcctgtaaaaaatgttgccctggtgcatccatcatccggcgtaaatccagcgggctagtccgatagtgcgcaccagacaagagctgataaacctttaacggcgtttctggatcgctttgccataacgtctgttcaaatgcggaaatgacaatattgccttgtggtgtatgggtgaagttttcatcgtcaaaaaccagtgcctcgctgaccattttttccagcgggcatccctgcgcccagcggatcggctgttgcagttcaaaacggtgtaaatgcggaaagcgagcgcaaaatttcagcaaaaaaccacgtccggtgccttcgtagccctgcaccgtagtggttaacaacgttcgaggaaaacggcttaccagttgatgcaacaatggcgcaggtatggctgcggcttcatcgaccaccagccagtcggcttgctcatcgctggctaacaaggcatccggcgcaataaagcgaaacttctcgcccgcaaattgtgccagtacatccgtactcgcttttgcgggcgcggtgacaatcgctctgcccgcaatacgagaaatgagttgccctgccaacgcgctcttaccgcgcccacgcgcagccgttaccgctgccacgcccggcggcatggtcattagctgctttaagagttgctgttgttctggttgtggtgcgccagtcgcggggtaccagtcagtacggggagtaaaatgcgccaagctgaatggctggttttgccgccagaggatagcctcgttatccgccgtaagtacgcgtttgagatgctggacaaaatgcggcgtcgcaatagggtcagggcaatcactccagcgcaggctgtcggcatcaggttggttttcccactcttcccatacagggagtaacaaaaccagccagcttcccgctttcaacgttccgctaagtgcggcaaaggcagcggcatcaaagccgtggcgggcgtcgaataccgcatgccggaactcgcgcccaagtaaagtttgtagtgcgctgggagaacagtggttttcagcatctggccgcgggctaatccacagccagtcgccaggtaaggcatcacgcaacttaagagtatgctcaaaacaccaaccctcttccccgctcaacaccagcaagcggcggatcccttcacgtttcatttgcgctgttaatgtgtgaagcgcagtcagttcagccatccctgccccggaagttaaatgcttttaccaaaagtattgcattgtgccggatcgccgctgtcgaaaccacgtttaaaccagctgtagcgttgctgagaagtgccatgagtgaaactgtctggtactactcgcccctgactttgctgttgtaaacggtcatcgccgatggcctgcgccgcgttcagcgcctcttccagatcgccggtttccagaacgccttgctgctgcatactatgcccccagacaccggcaaaacagtcggcctggagttccatacgcacagataagcggtttacttccgcctgcgtcgcgttttgttgcagttgacgaactttcggctcgatgcctaacagtttctgcacatgatgaccgacttcatgggcgataacgtacccctgggcaaaatcgccatccgcgccaagtttgtctttcatgtcatcatagaaggagagatcgatataaaccgtgccatccgccgggcaatagaacggccccattatggactggcccgccccgcagccggtacgcgtcattccacggtacatgaccagcttcggttgctgataggtcttacccatcttctcgaactgttgtccccaggtgtcttccgtggttgccagaatcacgctggtgaattttgcggcttcgtcttcatttgggctaatactccgcgtactttgttgttgggaaaccggctgcccggtcatcaacccggttaaatcaacaccatagtagcctgcaaccagcacgactatcagtaaaatcagcccgcctttaccgcttggcaggcgaaaaccgggaccgcccatagatggaccaccagagctgttgcgcctgtcttcaacattgtcactttcacgtcgcccttgccaacgcatagatacctcaacaatatattcattatagaaatgatcgtaggtggttcagaggaagattaccacaggaaagcgggatgaaatggcggaggaatgagcgttcaatgcatatattccgagagcggttgtcttgccgtgccagctgcacggcaagatgatgaacagaaaaatcagtccagctgtacacccaggcggcgggcgacggcttcataggcttcgatcaggccaccgaggctctggcggaaacggtctttgtccattttctccagcgtttctttgtcccacaggcggctaccgtccggggagaactcatcacccagtaccacttcgcctttgtacagaccaaattccagcttgaagtcgaccagaatcagaccagcatcatcgaacagttttttcagcacgtcgttcgctttgtaggtcagctctttcatacgcgccaggttctctttgctcacccagccaaaggtttcgcagtaagattcgttgaccatcggatcgtgcatggcgtcgtttttcaggaacagatcgaacagcggcgggttcagctcaataccttcttcgattccaagacgtttcaccagagagccagcagcacggttacgcacgacacactcaaccggcaccatatccagctttttcaccagacattcggtatcggagagcagacgctccatttgagtcgggatacccgcttcagccagtttgctcataatgaagtagttgaacttgttgttcaccatacctttgcgatcaaactgctcaatgcgcgcgccatcccctgcactcgtatcattgcggaattcgagcaccaacaggtccgggttttccgtgctgtatacggttttcgctttaccacgatacaactcagcttgcttttgcatctttatcactcctgggtgtgaattaacgttttaaaatcttttgctgtctggtgtgccggatgttttgtcggatgcggcgtgaacgccttatccgaactacgtccgacaaacaaatttcgtgcgaattaccgctaaaatcgcgttttcctgcagacgcacacgtttgcgtatcatatcagaaaaaagggccggatgattccagccctgtatttttacttgctaaacgcagcctggaagacagctaccagcgcgtcgttctgactctgagtcagagtatgacctttcggatcgatgaactgtaggctgctgcggttatctaaatcgccaacctgcagtttatagtcaccggatgccaggcctggatcgctcgcgcccagttcctgccagtcgctgtcagacagcggcttataagttacggccatgttgccctggctacgggtgctgtcggtcactttcatgcccactttttccagcgccgctggcagacgttgccaaaccacattgaacggcccgcgtacgaccagcattggtaaaccggtgtcatcagctgcactttgtacgtccatagtggtggaggcacgattttgcgcagcgttcgcggcgtcagtggcagatttatccagaccggcggaaataacgttcatcatctccgtgctgtaacgctgcatggaagccgcgtctgcaaccggtttgcccgcctgttccaggttcagcagtttaaccgtaaccgcctgctgataaccctgcggcttaacagagatttgataacgaccacgatactgctcgtcttcgtccagacggttccattgtacccaatcggtggtcagtgtctgaccagcatcatcacgttgggtgatggtgtagtttttcgcctgcagcacgctaaccacctgcggccacagagtattgccacgaccattttccaccagcaaactagcggtatcgcccgtgaactgggtacgcgcgccagaaaccagtgccagcggctgggctggtggacgaatgtccagcgccttaccgacagcaccactaccgttggtcaccgggattgcataatcaccggaggtcaccggcaaaatcattccagccggggcatgaagctccgcaagcggtgccgcttccaggtaggcttcatcaccactgacctgacgcttatagcgactgtcagaactacaggcagcgagtaataaaacaaggctaacacccgcaacctttgccaggcggctcttttgaacagagtaagccatcaaatctccctaaactttacagcaaaccggcatgcttaagcgccgctctgaccgtctcacgaccactgtcggtgattggtgtcattggcaggcgcagcgtatcggtcgccacaagacccagttccttacatgcccatttcaccgggattggattgggttcgacaaatagtttgttgtgtaatggcatcagacgctgattaataacgcgtgcctcggcaaaatgcccttctgctgccagtttgcacatctgggccatatcacgcgctgcgacgttagccgtaacggaaataaccccatgaccgcccaattgcatgaagtccagcgcgctcgcatcatcgccgctcagcagaacaaaatcatcactaaccagctctttgatctggtttacacgcgttaagttccctgttgcctctttgattccgataatattttttactttcgccagacggcccaccgtttccgggagcagatcgcagccagtacgggacggcacattatacagaatttgcggcaggtcagtatgctcagcgatggctttgaaatgctgatacaaaccttcttggctcggacgattgtagtaaggggttaccgtcaggcagccgacgataccactgtcattgaagcgctgcgtcaggctaatggcttccgcagtagcgttagcgccggtcccggcaattaccggaatgcgcccatcagccagatccagcgtcatcatcaccacatcagcatgttcgtcatgatttaaggtagcggactcgccagtggtgccaacagaaacgatcgcgctagtaccgctggcgacatgataatcaatcagttttttcaagctagcccgacagacattacctttttcatccatcggagtaacaatcgcgacaatacttcccgtgaacatgggccatcctctgtgcaaacaagtgtctcaatggtacgtttggtatggcattaaaagcaagcagacagaaccgttctgattgttgtatgcatgttttttttatgctttccttaagaacaactcaccccttaaaggaataaccagtttgacactgagtagccaacattatctggtgatcactgcgttgggtgccgatcgccctggaattgtgaacaccatcacccgtcatgtcagtagttgcggctgtaatattgaagacagtcgcctggcgatgctgggagaagagttcacgtttattatgctgctttccggtagttggaatgccattactctgattgaaagtacgttaccgttgaaaggtgccgaactggatcttttaatcgtgatgaagcgcacgacggcgcgtccgcgtccgccaatgccagcatctgtctgggttcaggtcgatgtggcagactccccgcatttaattgaacgcttcacagcacttttcgacgcgcatcatatgaacattgcggagctggtgagccgcacgcaacctgctgaaaatgaacgggctgcgcagttgcatattcagataaccgcccacagccccgcatctgcggacgcagcaaatattgagcaagcgttcaaagccctatgtacagaactcaatgcacaaggcagtattaacgtcgtcaattattcccaacatgatgaacaggatggagttaagtaatgaatccactgaaagccggtgatatcgcaccgaaatttagcttgccggatcaagacggagaacaagttaatttgaccgacttccagggacagcgtgttctggtttatttctacccgaaagccatgacccccggctgtaccgtacaggcctgcggcttacgcgataacatggatgagttgaaaaaagcgggcgttgatgtgctgggtatcagcaccgataaacccgaaaaactctcccgttttgcggaaaaagagctgcttaactttacgctcctgtctgatgaggaccaccaggtgtgcgaacaattcggcgtctggggtgaaaagtccttcatgggcaaaacctacgatggcattcatcgcatcagcttcctgattgacgctgatggcaaaatcgaacatgtctttgacgatttcaaaaccagcaatcaccacgacgttgtgctgaactggctgaaagaacacgcctgattactttgctccattccgtgctggctgcgcttgcggccagcatacctcacttctcgtgatcaagatcacattctcgctttcccctgcgacacgggtgtcgaatccattttttgctgaacgttaatgaccatcatttttgtaccgttcagaatccagttaatacataacttattgaatatattgagttaatcagaatggcatcctttatgcaatatgaaatgcaatgtttcatatcattttcaaggagccgacatgaaccgctttgtggtggccgaaccactgtggtgtacaggatgtaatacctgtctcgctgcctgtagcgacgtgcataaaacgcaaggtttacagcaacacccgcgcctggccctggcgaagacgagtacaatcactgcccctgtcgtgtgtcatcactgtgaggaagccccttgcctgcaggtctgcccggtcaatgccatctctcagagggatgatgcgatccaactcaacgaaagcctctgtattggctgcaagctttgcgccgtggtctgcccatttggcgcaatcagcgctagtggaagccgtccggtgaatgcccatgcgcaatatgtttttcaggctgaaggcagtctcaaagacggcgaagaaaacgcgccaacacaacatgctttgctgcgctgggaacctggtgtccagaccgtcgcggtgaaatgcgacctgtgtgatttcttgccagaaggtccggcctgcgttcgcgcttgcccgaatcaggcgttacggctgatcaccggtgatagcctgcaacgtcagatgaaagaaaaacagcgccttgccgcaagctggtttgccaatggcggggaggatcccctttccctcactcaggagcaacgctaatggatgccctgcaattattaacctggagcctgattctctatctgtttgctagtctggctagcctgtttttactcggtctggacagactggctattaagctttccggcatcacaagcctggtgggcggcgtgattggcatcatcagcggaattacgcaattacatgctggtgtaactttagtcgcccgttttgcccccccttttgaatttgccgatttaaccctgcgaatggatagcctcagcgcatttatggtgctggttatctccttgctggtggtggtttgttctctctatagtttgacttatatgcgcgaatacgagggcaaaggcgcggcggcgatgggcttctttatgaatattttcatcgcaagcatggttgccctgctggtgatggacaacgctttttggttcatcgtgctgtttgaaatgatgagcctgtcttcctggtttctggtcattgccaggcaggataaaacgagcatcaacgctggcatgctctacttttttatcgcccacgccggaagcgtgctgataatgatcgccttcttgctgatggggcgcgaaagcggcagcctcgattttgccagtttccgcacgcttagtctttctccggggctggcgagcgcggtgttcctgctggcctttttcggttttggcgcgaaagccgggatgatgccgttgcacagctggttgccgcgcgctcaccctgccgcaccaagccacgctagcgcgttgatgtctggcgtaatggtcaaaataggtattttcggcatcctgaaagtagcgatggatctgctggcgcaaacgggtttgcctctgtggtggggcattctggtgatggcgatcggcgcaatctccgcgctcctgggcgtgctatatgcgctggcggaacaggatatcaaacggctgctggcctggagtaccgtcgaaaacgtcggcattattttgctggcagtcggtgtggcgatggtcggtctgagtctgcacgacccgctgctcaccgtggttggactgctcggcgcactgtttcatctgctcaaccatgcgctgttcaaagggctgctatttctcggcgcgggagcgattattagccgtttgcatacccacgacatggaaaaaatgggggcactagcgaaacggatgccgtggacagccgcagcatgcctgattggttgcctcgcgataagcgccattcctccgctgaatggttttatcagcgaatggtacacctggcagagcctgttcagtctaagtcgtgtggaagccgtagcgctacaacttgcgggtcctattgctatggtaatgctggcagtcactggtgggctggcagtaatgtgcttcgtaaaaatgtacggtattactttctgtggtgcgccgcgcagtacacacgctgaagaggcacaggaagtgccaaatacgatgatcgtcgccatgctactgctcgcggcactctgcgtattaattgcgcttagtgccagttggctggcaccgaagataatgcatattgcccatgcgtttaccaatacccctcccgccactgtcgccagcggaatagcacttgtacccggcacgtttcatacacaggtcacccccagtttactgttgctgttactactggcgatgcctttgctgcctggcctttactggctgtggtgtcgtagccgccgcgcagcgtttcgtcgcacaggagatgcctgggcatgcggctacggctgggaaaatgcgatggccccgagtggcaatggcgtgatgcagccgctgcgtgtggtcttttctgcgctatttcgtctacgacaacagctcgaccctacgctgaggctaaataaaggtcttgcgcacgtcaccgccagggctcagagcacagaacccttctgggatgagcgggtgatccgccccatcgtgagcgccacccaacggctggccaaagaaatacagcatctgcaaagcggcgactttcgtctctattgcctgtatgtggtcgccgcactggttgtgctgctaatcgctattgccgtctaaggaaatcaccatgagacaaactctttgcgacggatatctggtcatttttgcgttagcacaggccgtgattctgctgatgctaaccccactttttacgggtatttcccggcagatacgcgcgcgtatgcactcccgccgcgggccggggatctggcaggattatcgcgatatccacaaactgtttaaacgccaggaagttgcgccgacatctagtggtctgatgttccgcctgatgccgtgggtattaatcagcagcatgctggtgctggcgatggccttaccactgtttattaccgtttccccttttgcgggcggcggcgatctgatcacccttatctatcttcttgccctgtttcgttttttctttgctctttccgggctggataccggaagtccgtttgcgggagtcggtgccagtcgcgagttgacgctcggcattctggtcgaaccaatgcttattctcagtctgctggtattggcgctgatagcaggttccacgcatatcgagatgatcagcaatacgctggcgatgggctggaacagcccgctaaccaccgtactggcgttactggcctgtggttttgcctgcttcattgagatgggaaaaattccctttgatgttgctgaagcagaacaggaattacaggaaggcccgctgaccgaatattccggtgccgggctggcgctagcgaaatgggggctggggctgaaacaggtcgtgatggcaagtctgtttgtggccctgtttctgccctttgggcgcgcgcaagaactttctctcgcctgcctgctgactagtcttgtcgttacgctgctcaaggttttgctgatttttgtactggccagtatcgcagaaaacacgctggcacgcgggcgttttttactcattcaccatgtgacctggcttggcttcagccttgctgcgcttgcatgggtcttctggttaaccggtctgtaaggagcactgacggaatatggaaaatcttgctctgacgacgttattgctgccttttatcggcgcactggtcgttagctttagcccacaacgtcgggccgccgaatggggggttttgttcgccgcgctgaccacgctgtgcatgttgagtctgatctccgcgttttatcaggccgataaagttgccgtcacgttgacgttggtcaacgtgggggatgtggcgttgtttggcctggtcattgatcgcgtgagtacgctgattctgtttgtggtggtgtttctcggtttgctggtcacgatctactccacgggttatctgacggataaaaatcgcgaacacccgcataacggcacgaatcgttattacgcatttttactggtgtttatcggcgcgatggcgggactggtactctccagcacgctgctcggtcagttgttgttttttgaaattacaggcggctgctcctgggcgttgatcagttattaccagagcgataaagcgcagcgtagtgcactaaaagcgttacttatcactcatatcggcagcttggggttgtatcttgccgccgccacgctgtttttgcagaccggaacgtttgcgcttagcgcgatgagcgagttacacggcgacgcacgttatctggtttatggcggcatcctgtttgccgcgtgggggaaaagcgcccagctaccgatgcaagcgtggctaccggacgcaatggaagcgccaacaccgatcagcgcctatctccacgccgcaagcatggtgaaagtgggcgtttacatttttgcccgcgctattatcgacggcggcaatatcccgcatgtgattggcggcgttggcatggtcatggcactggtcaccattctttatggctttctgatgtatttgccacagcaggatatgaagcggttgctagcctggagcaccatcactcaacttggctggatgttcttcggcttgagcctctccatcttcggcagccggctggcgctggagggcagcatcgcctacatcgtcaaccacgcgttcgctaaaagcctgtttttccttgtagcaggtgcgctgagttacagctgcggcacgcgcttgttgccgcgtctgcgtggcgtattgcacaccctgccgttgccaggcgtgggtttctgcgtggcagcgctggcgattaccggcgtgccgccgttcaacggcttcttcagtaaattcccgctgtttgctgccggttttgcgttgagtgtggagtactggatcctgctgcccgccatgattcttctgatgattgaaagcgtcgccagtttcgcctggtttattcgctggtttggtcgcgttgtgcctggcaaaccgagcgaggccgtcgccgatgccgcaccgctgccaggaagtatgcgcctggtgttgattgtactgattgtgatgagcctgatttccagcgtaatcgccgcgacctggttgcagtaaggagatgatgaatgaccggttctatgatcgtaaataatctggcgggactgatgatgctgacaagcctgtttgtgattagcgtcaaaagctatcgcctgagttgcggattttacgcctgccagagtctggtgctggtgtctattttcgccactctcagctgcctgttcgccgcagagcaactgctgatctggtccgccagcgcctttatcaccaaagtgctgctggtaccgttaatcatgacttacgctgcacgaaatattccccagaacatcccggaaaaagcgttattcggtccggcaatgatggcactgctcgcggcgttaattgtcctgctttgcgcatttgtcgttcagcccgtgaagctaccgatggctaccgggctgaaaccggcgctggcggtagcgttaggtcattttctgcttggcctgctgtgcattgtcagccagcgcaatatcctgcggcaaatttttggttactgcctgatggaaaacggctcccatctggtgctggcgcttcttgcctggcgagcaccggaactggtggaaataggtatcgctaccgacgccatcttcgccgtcattgtgatggtgttactggcaagaaaaatatggcgtacccacggcacgctggacgtgaacaacttgaccgcgctgaagggataatgagatgagttattctgtgatgttcgctttactcctgctcacgccgctgctttttagcctgctctgttttgcctgccggaaacggagactttctgcgactcgcacggtgaccgtattacatagcttagggatcacactgctgctgattctggcactctgggtggtccaaactgccgctgatgcaggagaaatattcgctgcgggactgtggcttcatattgatggtctgggcggtttgttcctcgccattcttggtgtgattggctttctcaccggtatttacagcattggctacatgcgtcatgaagtggcacacggcgagcttagtcccgttacgctgtgcgattactacggtttcttccatctgtttttgttcaccatgctgctggttgttaccagcaataacctgattgtgatgtgggcggcgatcgaagccaccaccttaagcagcgcgtttctggtaggcatttacggtcagcgtagtagcctggaagctgcatggaagtacatcattatttgtactgttggtgtcgcttttggtctgttcggtaccgtgctggtatacgccaacgccgccagcgttatgccgcaggcagaaatggcgatattctggagcgaggttcttaagcaaagctccttgcttgacccaacattaatgctgttggcctttgtgtttttgctaattggctttggtaccaaaaccgggctatttcccatgcacgcctggctgccggatgctcacagtgaagcgccgagtccggtcagcgccctgctctccgccgtattgctgaactgcgcgctgttggtgctgattcgctattacatcattatttgccaagccatcggcagcgatttccccaaccggttgttgctcatcttcggcatgttgagcgttgccgtggcggcatttttcattctggtacagcgggacattaagcgtctgctggcgtactccagcgtggagaacatggggctggtcgcggtggagctaggcattggcgggccgctgggaatttttgccgcgctgctgcacatcttaaaccacagtctggcaaaaacgctgctgttctgcggttccggcaatgtactgctcaagtacggcacgcgcgatctcaacgtcgtctgtgggatgctcaaaatcatgccatttaccgccgtgctgtttggcggcggtgcgctggcgctggcagggatgccgcccttcaacatttttcttagcgaatttatgaccattaccgccggactggcacgtaatcacctgctgattatcgtcctgctgttattgctgttaacgctggtgctggcgggcctggtacggatggctgcgcgggtgttaatggcgaaaccgccgcaggccgttaaccggggtgatctcggctggttgaccaccagcccaatggtgattctgctggtcatgatgctggcgatgggaacgcatattccacaacctgtcatcaggatcctggcgggcgcttccactatagtcctcagtgggacgcacgatctgcctgcacaacgtagcacctggcatgattttttgcctagtggcaccgcatctgttagcgagaaacacagtgaacgttaatagtagcagtaatcgtggcgaagcgattctcgccgccctgaaaacgcagttccccggcgcggtgctggatgaagagcgacaaacgcctgaacaggtcaccattacggtgaaaatcaatctgctgcctgacgttgtacagtatctttattatcaacatgatggctggcttccggtcctgtttggcaacgacgagcggacacttaacggtcattacgcggtttattatgcccttagtatggaaggggccgaaaaatgctggattgtggtgaaggcgctggtcgatgccgacagtcgggagtttccgagtgtcacaccgcgcgtccctgccgcggtctggggcgagcgagaaattcgcgatatgtacgggctgattccggttggcctgccggatcagcgtcgcctggtgttgcccgatgactggccggaagatatgcatccgctgcgcaaagatgcgatggattatcgactgcgccctgaaccgacgactgattccgaaacgtatccgtttatcaatgagggcaacagcgatgcgcgggtgatccctgtcggcccgctgcatatcacctccgatgaaccgggtcacttccgcttgtttgtggatggcgagcaaattgtcgatgctgattaccgcctgttttatgtccatcgcggcatggagaaactggcagaaacgcggatgggctacaacgaagtgaccttcttaagcgaccgcgtgtgtgggatttgcggttttgcccacagtgtggcctataccaatagcgttgaaaatgcactggggattgaggtgccgcaacgagcacatactattcgcagcattctgctggaagtcgaacggctacacagtcatttgcttaaccttggcctctcctgccatttcgttggttttgataccggctttatgcaatttttccgcgtgcgggaaaagagcatgacgatggcggaattgctgatcgggagccgtaaaacctacggtctgaatctgattggtggtgttcgccgcgatattctcaaagagcaacgtctgcaaacgctgaaactggtgcgcgagatgcgcgccgacgtgagcgagctggtagagatgctgcttgctacgccgaatatggaacaacgcactcagggcattggcattctcgaccgacaaatcgcccgtgatttgcgctttgatcacccctacgccgactacggcaatattccaaaaacactgtttacctttaccggcggcgatgttttctcccgcgtgatggtccgtgtcaaagagacgtttgatagcctggcaatgctggaatttgccctcgacaacatgccggataccccactgctgaccgaaggctttagctataaacctcacgcattcgcgctgggctttgttgaagcgccacgcggtgaagacgtgcactggagcatgctcggtgataaccaaaaattgttccgctggcgctgccgtgccgccacctacgccaactggccggtgttgcgttacatgctgcgcggcaataccgtttctgacgcaccgctgattatcggtagccttgatccctgctactcctgtaccgaccgtgtgacgctggtagatgtgcgcaagcgccagagtaaaaccgtgccgtataaagagatcgaacgctacggcattgatcgtaaccgtagcccgctgaagtaaggacagaagatgctgaagttactgaaaactattatgcgcgccggaaccgcgacggtgaaatatcccttcgcgccactggaggtcagccctggctttcgcggaaaaccggacctgatgcccagccaatgtattgcctgcggtgcctgcgcctgtgcttgtccggcaaatgcgctggctatccagaccgacgaccagcaaaatagccgcacctggcagctctatctggggcgttgtatttactgcggacgttgtgaagaagtgtgcccgaccagagccatccagcttaccaataactttgaactgaccgtcaccaataaagccgatctctatacccgcgcgacgttccatctacaacgttgcagccgttgcgaacgcccgtttgccccgcaaaaaaccatcgcactggctgctgaattgttagcacagcaacaaaatgcgccacaaaaccgcgaaatgttgtgggcgcaagcgagcgtctgcccggaatgcaaacaacgcgcgacgctgatcaacgacgatacagatgtactgctggtggctaaggagcagctatgagtccagtgcttacacaacatgtcagccagcccatcacgctggacgagcaaacgcaaaagatgaagcggcatttgctacaggatatccgtcgcagcgcttacgtttatcgcgtcgattgcggcggctgcaacgcctgtgaaatcgaaatttttgctgccattacaccagtattcgacgcagaacgttttggcattaaggttgttagtagtccgcgtcacgccgatattttgttatttactggcgcagtcacccgggcgatgcgtatgcctgcacttcgggcgtatgagtctgcccccgatcataaaatttgtgtttcctacggcgcgtgcggtgtcggcggcggtattttccacgatctctacagcgtctggggcggtagcgacaccattgtccccattgatgtttggatccccggctgcccgccaacaccggccgccaccattcacggtttcgccgtggcgctcggtttgctgcaacagaagattcacgctgtggattatcgcgatcccaccggggtgactatgcaaccgttgtggccgcagatcccgccaagtcagcgtatcgccattgagcgagaagcgcggcggctggcgggctatcgtcaggggcgagaaatttgcgatcggctcctgcgccatttaagcgacgatcctacaggaaatcgggttaacacctggttgcgcgatgccgacgatccacgtctcaatagtatcgttcagcaactctttcgcgtactccgggggttacatgactgaagagtgcggggaaattgttttctggacgctgcgaaaaaagtttgtcgccagtagcgacgagatgccggaacacagctctcaggtaatgtattacagcctagctatcggccatcacgttggcgtgattgattgtctgaatgtcgccttccgctgcccactgacggaatacgaagattggcttgcactggtcgaagaggagcaagcccgacgtaagatgctgggggtgatgacttttggtgagattgttattgacgccagccacaccgccctgttgacccgggcattcgcgccactggcggatgacgcgacgtctgtgtggcaggcgcgtagcattcaattcattcatctgttggatgaaattgtgcaggaaccggccatctatctgatggccagaaaaattgcgtgagaaggatttctcattaataaggactgttgatggctatgagtgacgaggcgatgtttgccccgccacaaggaataacaattgaagcggtaaacggaatgctcgcggagcggttagcacagaaacacggcaaggcgtctttattacgcgccttcatcccgctgccgccgccgttcagcccggtacaacttattgaactgcatgttctcaaaagcaacttctattaccgctaccatgatgatggcagcgatgtgacggcaacaacagagtatcagggcgagatggtcgattatagccgtcacgccgtccttctcggcagtagtggaatggcggagctacgctttattcgcacccacggcagtcgttttacttcccaggattgcacactgtttaactggctggcgcggataatcaccccggttctgcaaagttggctcaatgatgaagaacagcaggtggcgctgcgtttgctggagaaagatcgcgatcatcatcgggtactggttgatattactaatgcagtgctgagtcatcttgatctcgacgatctgatcgctgacgtcgctcgtgagatccatcattttttcggtctggctagtgtcagtatggtactgggcgatcatcgaaagaacgagaagttcagcctgtggtgcagcgatctttctgccagtcattgtgcgtgtctgccacgctgtatgcctggcgaaagtgtattgctgacacaaacgctacaaacccgacaaccgaccttgacgcaccgtgcagatgatctgtttctctggcaacgcgacccgttattactcttacttgcatctaacggctgcgaatctgcgctccttataccgcttacctttggcaaccatacaccgggtgcattgttgctggcgcatacctcttccactctctttagtgaggaaaactgccagctactacaacacatagccgatcgcatcgctattgccgttggcaatgccgatgcctggcgtagcatgaccgatttgcaggaaagtttgcagcaagaaaaccaccagcttagcgagcagctccttagcaatctgggcatcggtgacattatctatcaaagccaggcaatggaagacctgctccagcaggtagatattgtggcgaagagcgacagtacggtgttgatttgtggtgaaaccggaactggcaaagaggtgatcgccagagcgatccatcaacttagcccgcgacgcgacaagccgctggtcaaaatcaactgcgctgccatccccgccagtcttctggaaagtgagttattcggtcatgacaaaggggcgtttactggtgcgattaatacccatcgtggtcgttttgaaattgccgatggcggcacgttgtttctcgatgaaattggcgatctgccgttagaacttcagcctaaactgctgcgcgtattgcaggagcgggagattgagcgtctcggcgggagtagaacgatcccggtgaatgtcagagtcattgccgccaccaaccgtgatttgtggcaaatggttgaagatcgccagtttcgcagcgatctcttttatcgcctgaatgtcttcccactggaattgccgccgctacgcgaccgtccggaagatatccctcttttagcaaaacatttcacgcaaaaaatggcgcgccatatgaatcgcgcaattgacgccatcccgaccgaggcactacgccagttgatgagctgggattggccgggcaacgtgcgcgagctggaaaacgtgattgagcgggcggtactgttgactcgtggtaacagtctgaatttacatctaaatgtccgacaaagccgtttactgccgacgctaaatgaagatagtgcgcttcgcagtagtatggcgcagttactgcacccgacgacgccagagaatgacgaagaagaacgtcagcgcattgttcaggtattgcgagaaaccaatggcattgttgccgggccccgtggcgcagcgacgcgattagggatgaagcgcaccacgctgctgagtcgaatgcagcggctggggatcagcgttcgcgaggtgttgtaatctgcttttgcaggagtatgcatgagaaacaaactctctttcgacttgcagttgagcgccagaaaagcggcaatcgctgaacggattgccgcccataaaattgcccgcagtaaagtgagcgtctttttaatggcgatgtccgctggcgtgtttatggcgatcggatttactttttacctttccgttatcgccgatgccccgtctagtcaggcattaacccatctggtgggcggcctttgctttacactcggctttattttgctggcggtttgcggcaccagcctgttcaccagcagcgtaatgacggtgatggcaaaaagtcggggcgtcattagttggcgaacttggctgattaacgcacttctggtggcctgcggtaatctggcaggtattgcctgtttcagtttgttaatctggttttccgggctggtgatgagtgaaaacgcgatgtggggagtcgcggttttacactgcgccgagggcaaaatgcatcatacatttactgaatctgtcagcctcggcattatgtgcaatctgatggtttgcctggcgctgtggatgagttattgcgggcgtagcttatgcgacaaaatcgtcgccatgattttgcccatcaccctgtttgtcgccagtggctttgagcactgtatcgccaatttgtttgtgattccgttcgccattgccattcgccatttcgcccctccccccttctggcagctggcgcacagtagcgcagacaattttccggcactgacggtcagccattttattaccgccaatctgctcccggtgatgctgggtaatattatcggcggtgcggtgctggtgagtatgtgttatcgggctatttatttacgtcaggaaccctgaaaaatcagcccggcgaaacagttcgtcgggctgaagattattcttgcgcgatttgcccatcgggccaggcatgaatcacggctttgatcagcgtcgccaacggaatggcgaagaatacgccccagaatccccacaaaccaccgaagatcaccacgcttaaaataatcaccagcggatgcaggttaaccgcttcggagaacaacaccggcactaacaggttgccgtccagcgcctgaataatcagatacaccgcgaagcagctccagaattcagtacctgcgccaaactggaatagcgccacgccaaccaccggaatggtcaccacaaatgcgccaatgtacggaataagaacgctgaagccgaccagcactgccagcagcaggctatagttcagcccgaagagcaagaaccccagccaggtggcgatccccaccacgatcatctccagcactttgccgcggatatagttggtgatttgttgattcatctccttccacacctgtcctgccagcccacggttacgcggcagcacccggcgaacggcgttcagcatctgctctttgtctttcagcaggaagaagaccatcaatggcaccagcaccagatagacggctatggtcagcaaaccgaccaggctggcgagggaaattttcaccacgctatcgcccatggtcagcatccgactgcgcatattttcggccattgcatcaataatgcccgcgtccattaacgccggatagcggcgcggcaacgtggcggcaaagtcagaaagcttattgagcatccccggcatatcgcggattaagtagatgccctgttgccaggcgataggcagtaccacgaacgccatcagtagcaatataccgacgaaaaccaccaatacaatgctcgtcgcccagcggcgggagcagccaatagattgcagacgcacggttggccattccagcaaataggccagcacaatagccaccagcaacggagcaagcaggccactaaagaaaaagataatgccaaatccggcaactaaaataaccagcaaggcaatcgcttccgggtcgctaaaacggcggcgataccattgcatcaacatttcgagcataaagaccttccctgaacctcaagagcgggattgcgatccgcaattgtatcgaaatgtcacaaaaaagacttcgctttttatgacggattcaggaaactgaaaagtcatttgagtgggctaatcttcgccgttacactcaaaggcggcgcggtgggaacgatatttcacagtatcggtcaaatgactatctccagaaatacaggatagaggttatgttcaggcagttgaaaaaaaacctggttgcaaccctcattgctgctatgaccattggtcaggtagccccggcgtttgccgacagcgcagacaccttgccggatatgggaacctccgcaggaagcacgctttccattggtcaggaaatgcagatgggcgactattatgtccgccagctacgcggcagcgcgccgttaattaatgacccgctgttaacgcaatatattaatagcctggggatgcgtctggttagccatgccaatagcgttaagacaccgtttcatttttttctgatcaacaacgacgaaattaacgcctttgctttctttggcggcaacgtggtgctgcactctgccctgttccgttattccgataacgaaagtcaactggctagtgttatggcgcacgaaatctcccacgtcacccaacgtcacctggcgcgagcgatggaagatcagcagcgcagcgcgccgctgacctgggtcggcgcgttaggttctattttactggcgatggccagtccgcaggcggggatggcggcgctgaccggtacactggcgggaacgcgtcaggggatgatcagtttcacccagcaaaatgaacaggaagcggaccgcattggtattcaggtgctgcaacgcagcggattcgatccgcaggcgatgccaaccttcctcgaaaaattactcgatcaggcgcgttactccagccgcccgccggaaattttattgactcacccgttgccggaaagtcgtctggcagatgcccgcaaccgtgctaatcagatgcgcccgatggtggtgcagagcagcgaagatttctatctggcgaaagcgcgcacactggggatgtataattccggacgtaaccagctcaccagtgatttgctggatgaatgggcgaaaggaaacgttcgtcagcaacgagcagcacaatatggtcgtgctttacaggcgatggaagccaataaatacgacgaggcgcgtaaaacgctgcaaccgttactggcggcagaacctggcaacgcatggtatctcgatctggctactgatatcgatcttgggcaaaacaaagccaatgaggcgatcaatcgtctgaaaaatgcccgcgatttacgcaccaatccggtgttgcagctcaacctggcgaacgcttatttgcaaggcggtcaaccacaagaagcggccaatattctgaatcgctacacctttaataataaagatgacagcaacggctgggatttgctggcacaggcggaagccgcgctaaataaccgcgatcaggagctggctgcgcgagcagaaggttatgcgctcgccggacgactcgatcaggccattagcctgttgagtagcgccagtagccaggtgaaattaggcagcctgcaacaagcgcgttacgatgcgcgcatcgaccagttgcgccagctgcaggaacgctttaagccttataccaagatgtaattcgcattaaaggaagaacaatgaccaaacaggtaaaaatctaccataacccacgctgtagtaagagccgggaaacgctgaacctgctgaaagaaaacggcgtggagccagaagtggtgctctaccttgagacacccgccgatgcggcaacgctgcgcgatttgctgaaaatactggggatgaatagcgcccgtgaattgatgcgccagaaagaggatctttataaagaactgaacctggctgacagtagccttagcgaagaggcgctgattcaggcaatggtggataatccgaagctgatggagcgcccgattgtggtcgcgaatggcaaagcgcggattggtcgtccaccggagcaggtactggaaatcgtgggttaagatgtgctccatcgctagttgaagcacattgccggatgcgacgcttgccacgtcttatccggcctacgaatactatggattaacttcgcgtagttcggataaggcgttcgcgccgcatccgacaataaacaccttatttacaacttcagaatttctttcacaaacggaatggtcagcttacgttgcgcggtaatgctcgcacgatccaactgatccaacgtcataaatagcgtgcgcatttctctgtcgagccgcttcagcaagaaacgccccacatcttccggcagttcaaaaccacgcaaacgcgcgcgtaactgtagcgcctgcaacttatcttcatcagaaagtggctgcaatttgtagatctgcccccagtcgagtcggctcgcgagatccggtaatcccagattcaactgccgcggtggacgatcgccggtgatcaacaaccgtgttttgccgctttccagaattcgattgtagagatcgaaaatcgccatctcccacaactcatcgcctgcaatacactcaatgttgtcgatacagaccaggctcaaatgctccataccgtcgagcacttccggaacaaaccaggtgcgtttatccagcgggacatagcccaccgcatcgccacgctggctcaattccgcgcaagccgcgtgcagcagatggctgcgccccgcgccttcgcgtgcccagagatagatgtaaccgctatgttcctgacgcagcacgttttgcagcgcggccagtaaagaggagttatcccccggccagaaacttgcaaaggtttcgtcgtcaggaagataaagtggcaaagagagctgtgccggtgtgttcagagatacctcaaccaggatttcacaaaatcggctgaagtttaccacagaatcccatgatgtttgaaccgggcagcaacactgcccggtcggtacattatttgtctgttatatccgcgtcttctgcgtccagcaccacttcttcagggcgcagcacactgatcagtttgaagatcaaacttaagccgataccgacgatggtcgccagcgccataccttttaactccgccgcgccgatgtttaccttcgcgccactgacgccgatgatcaaaatcacggaagtcaggatcaggttctgtgctttgttgtaatccactttgctttcgatcaaaacacgaataccggaagcaccgatgacaccataaagcagcaggctaacgccgcccatcaccggcaatgggatcatctggatagcggcagccagtttaccgacgcaggaaagcaggatagcgaaaatcgccgccccgccgataacccaggtactgtaaacacgggtgatcgccatcacgccaatgttttctccgtaagtagtatttggcgtagagccaaagaagccggaaatcacggtgctcaagccattagcaaacatgctacggtgcagacctggatcgcgcagcagatcttttttgacgatattagccgttactaccaggtgccctacgtgttcggcaataaccactaacgccgctggcagaatagtcagaatggcaaaccactcgaagcgcggcgtatagagggttggcagcgcaaaccagtgagcattaataatcggcgtggtatcgacaattcccattgcgaaagagagcgcgtaccccaccagcacgccaattaaaatcgggataattgccaggaaaccacgaaacagcacggaacctaaaaccgtgaccgccagggtggtaatagagatgatgatggttttggagtctggcgtttgcccttcagccgggagtaaacccgccataccggcagctacgcccgccagctccagaccgatgacggcaacgattgcgcccattgccgcaggtggaaacagcacgtccagccagccggtccccgctttcttcacgataaaagaaaccaggcagaacagcacgccgcacataataaagccgcccagcgcgacttcataccctaacggcaacagtaacaataccggactaataaaggcaaagctggaaccaagataagccggaattttccctttacagatgaagagatacagcagcgttccaataccgttaaataacagtacagtcgccgggttaatatgaaataagacgggcaccaggacggttgcaccaaacatggcgaacaaatgttgcaaactaagcgggattgtctgtaaaagtggcggtctttcactcaccccgatagcacggcgcgtcatagtattatcctctgtattatgtgttataggcgctttactcaaaaaaaagccgactcttaaagtcggctttaattatttttattctttatttcgtaccaaagattttgtcaccggcatcgccgaggcccggaataatgtatccgtgctcgttcagtccctgatcaatgcttgcggtatacagttcgacgtccgggtgcgctttttccagcgcagcgataccttctggcgcagctaccagcaccagaactttgatgctgctgcagcccgcttttttcagcaggtcgatggtcgcgataacggaaccaccggttgccagcattgggtcaacgatcagcgccatacgctcatcgatgttagaaaccagtttctggaagtacggtaccggctccagcgtttcttcattacggtacataccgacaacgctgatgcgcgcgctcggaacgttttccagcacaccgtccatcataccaagacccgcacgcagaattggcacaacggtaattttcttacctttgatctggtcgatttctaccgggccgttccagccttcgatagttactttttccgtttcgaggtcggcggtcgcttcgtaagtcagcaggctacccacttcggaagcgagttcgcgaaagcgcttggtgctgatatcttgctcacgcatcagtcccagcttgtgtttgacgagtgggtgtttgacttccacgatcttcatactctttctcctttgaggggcagccacaaaaaaaatcgacggattatacctcctttcttcaaggcggcaatattcttttcgttgactttagtcaaaatgataacggtttgagataaagttattttatattcagatggttatgaaagaagattattccatccgaaaactaacctttaccctggcacaagtcttctttcgccgcgcgcctggggaaaagacgtgcaaaaaggttgtgtaaagcagtctcgcaaacgtttgctttccctgttagaattgcgccgaattttatttttctaccgcaagtaacgcgtggggacccaagcagtgaccgataaaacctctcttagctacaaagatgccggtgttgatattgacgcgggtaatgctctggttggaagaatcaaaggcgtagtgaagaaaacgcgtcgtccggaagtgatgggcggtctgggcggcttcggtgcgctgtgtgcattgccgcaaaaatatcgtgaacccgtgctggtttctggcactgacggcgtaggtaccaagctgcgtctggcaatggacttaaaacgtcacgacaccattggtattgatctggtcgccatgtgcgttaatgacctggtggtgcaaggtgcagagccgctgtttttcctcgactattacgcaaccggaaaactggatgttgataccgctagtgcggtgatcagcggcattgcggaaggttgtctgcaaagtggctgtagtctggtgggtggcgaaacggcagaaatgccggggatgtatcacggtgaggattacgatgtcgcgggtttctgcgttggcgtggtagaaaaaagtgaaatcatcgacggctctaaagtcagcgacggcgatgtgctgattgcactcggttccagcggtccacacagcaacggctatagcctggtgcgcaaaattcttgaagtcagcggttgtgatccgcaaaccaccgaacttgatggtaagccattagccgatcatctgctggcaccgacccgcatttacgtgaagagtgtgctggagttgattgaaaaggtcgatgtgcatgccattgcgcacctgaccggcggcggcttctgggaaaacattccgcgcgtattgccagataatactcaggcagtgattgatgaatcttcctggcagtggccggaagtgttcaactggctgcaaacggcaggtaacgttgagcaccatgaaatgtatcgcaccttcaactgcggcgtcgggatgattattgccctgcctgctccggaagtggacaaagccctcgccctgctcaatgccaacggtgaaaacgcgtggaaaatcggtatcatcaaagcctctgattccgaacaacgcgtggttatcgaataatgaatattgtggtgcttatttccggcaacggaagtaatttacaggcaattattgacgcctgtaaaaccaacaaaattaaaggcaccgtacgggcagttttcagcaataaggccgacgcgttcggccttgaacgcgcccgccaggcgggtattgcaacgcatacgctcatcgccagcgcgtttgacagtcgtgaagcctatgaccgggagttgattcatgaaatcgacatgtacgcacccgatgtggtcgtgctggctggttttatgcgcattctcagcccggcgtttgtctcccactatgccgggcgtttgctgaacattcacccttctctgctgccgaaatatcccggattacacacccatcgtcaggcgctggaaaatggcgatgaagagcacggtacaagcgtgcatttcgtcaccgatgaactggacggtggcccggttattttacaggcgaaagtcccggtatttgctggtgatagcgaagatgacatcaccgcccgcgtgcaaacccaggaacacgccatttatccactggtgattagctggtttgccgatggtcgtctgaaaatgcacgaaaacgccgcgtggctggatggtcaacgtctgccgccgcagggctacgctgccgacgagtaatacccccgtaattaaagcgccagctctgccgctggcgtttttcaattcacctgtaaatcgcaagctccagcagtttttttcccccttttctggcatagttggacatctgccaatattgctcgccataatatccaggcagtgtcccgtgaataaaacggagtaaaagtggtaatgggtcaggaaaagctatacatcgaaaaagagctcagttggttaagcttcaatgaacgcgtgcttcaggaagcggcggacaaatctaacccgctgattgaaaggatgcgtttcctggggatctattccaataaccttgatgagttctataaagtccgcttcgctgaactgaagcgacgcatcattattagcgaagaacaaggctccaactctcattcccgccatttactgggcaaaattcagtcccgggtgctgaaagccgatcaggaattcgacggcctctacaacgagctattgctggagatggcgcgcaaccagatcttcctgattaatgaacgccagctctccgtcaatcaacaaaactggctgcgtcattattttaagcagtatctgcgtcagcacattacgccgattttaatcaatcctgacactgacttagtgcagttcctgaaagatgattacacctatctggcggtggaaattatccgtggcgataccatccgttacgcgctgctggagatcccaagtgataaagtgccgcgctttgtgaatttaccgccagaagcgccgcgtcgacgcaagccgatgattcttctggataacattctgcgttactgccttgatgatattttcaaaggcttctttgattatgacgcgctgaatgcctatagtatgaagatgacccgcgatgccgaatacgatttagtgcatgagatggaagccagcctgatggagttgatgtcttccagtctcaagcagcgtttaactgctgagccggtgcgttttgtttatcagcgcgatatgcccaatgcgctggttgaagtgttacgcgaaaaactgactatttcccgctacgactccatcgtccccggcggtcgttatcataattttaaagactttattaatttccccaatgtcggcaaagccaatctggtgaacaaaccactgccgcgtttacgccatatttggtttgataaagcccagttccgcaatggttttgatgccattcgcgaacgcgatgtgttgctctattatccttatcacacctttgagcatgtgctggaactgctgcgtcaggctagcttcgacccgagcgtactggcgattaaaattaacatttaccgcgtggcgaaagatagtcgcatcatcgacagcatgatccacgccgcacataacggtaagaaagtcaccgtggtggttgagttacaggcgcgtttcgacgaagaagccaacattcactgggcgaagcgcctgaccgaagcaggcgtgcacgttatcttctctgcgccggggctgaaaattcacgccaaactgttcctgattagtcgtaaagaaaacggtgaagtggtgcgttatgcacacatcgggaccgggaactttaacgaaaaaaccgcgcgtctttatactgactatagcttgctgaccgccgatgcgcgcatcaccaacgaagtacggcgggtatttaactttattgaaaacccataccgtccggtgacatttgattatttaatggtaagcccgcaaaactcccgccgcctattgtatgaaatggtggaccgcgagatcgccaacgcgcagcaagggctgcccagtggtatcaccctgaagctaaataaccttgtcgataaaggcctggttgatcgtctgtatgcggcctccagctccggcgtaccggttaatctgctggttcgcggaatgtgtagcctgatccccaatctggaaggcattagcgacaacattcgtgccatcagtattgttgaccgttaccttgaacatgaccgggtttatatttttgaaaatggcggcgataaaaaggtctacctttcttccgccgactggatgacgcgcaatattgattatcgtattgaagtggcgacgccgctgctcgatccgcgcctgaagcagcgggtactggacatcatcgacatattgttcagcgatacggtcaaagcacgttatatcgataaagaactcagtaatcgctacgttccccgcggcaatcgccgcaaagtacgggcgcagttggcgatttatgactacatcaaaagtctcgaacaacctgaataaccctatgccaatacacgataaatcccctcgtccgcaggagtttgctgcggtcgatcttggtagtaacagttttcacatggtcatagcccgtgtggtagatggtgccatgcagattattggccgcctgaaacagcgggtgcatctggcggacggcctggggccagataatatgttgagtgaagaggcaatgacgcgcggtttaaactgtctgagcctgtttgccgaacggctacaagggttttctcctgccagcgtctgtatagttggtacccatacgctgcgtcaggcgctgaacgccactgactttctgaaacgcgcggaaaaggtcattccctacccgattgaaattatttccggtaatgaagaagcccgtctgatttttatgggcgtggaacatacccaaccggaaaaaggtcgcaaactggttattgatattggcggcggatctacggaactggtgattggtgaaaatttcgaacctattctcgttgaaagccgccggatgggttgtgtcagctttgcccagctttattttcctggcggggtcatcaataaagagaattttcagcgcgctcgcatggcggcagcacaaaaactggaaactttaacctggcaattccgtattcagggctggaacgttgcaatgggcgcttccggtaccataaaagccgcccatgaagtgttaatggaaatgggcgagaaagacgggataattaccccggaacgtctggaaaaactggtaaaagaagttttacgtcaccgtaatttcgcaagcctgagtttaccgggtctttccgaagagcggaaaacagtcttcgttccgggactggcgattttatgcggtgtgtttgatgctttagccatccgtgaactgcgcctttctgacggggcgttacgcgaaggcgtactgtatgaaatggaaggacgtttccgtcatcaggatgtgcgtagtcgcaccgccagcagcctcgccaaccagtatcacatcgacagcgaacaggcccgacgggtgctggataccactatgcaaatgtacgaacagtggcgggaacagcaaccgaagctggcgcatccgcaactggaggcgctactgcgatgggccgccatgctgcatgaggtcgggttgaatatcaaccacagcggtttgcatcgccactccgcttatattctgcaaaacagtgacttgccgggttttaatcaggaacagcagctgatgatggcgacactggtgcgctatcaccgtaaagcgattaagctcgacgatctaccgcgctttaccttgtttaagaagaaacagttcctgccactgatacagctattgcgccttggcgtattactcaacaatcaacgtcaggcaaccaccacaccgccaacattgacgctgattactgatgacagtcactggacactgcgtttcccgcatgactggtttagtcagaatgcgctggtactgcttgatctggaaaaggagcaagaatactgggaaggcgtggctggctggcggttgaaaattgaagaagaaagtacaccagaaatcgccgcttaatactttgcgggccgacgagaaatgtcggcccgcattattcaggcactttcgcgaatgggttcgatttcattcagcgtatcaattaacggctgcggcttaccaataagataaccctgcatataatcgatccccaaagagagcaccgcctcgcggatctcttcgttttcaacgtactctgccactaccagcattttcttcattcgcgccaggtggcaaatgcttgccactatctgataatccagactattactcacaatattgcggataaaactgccgtcaattttaagcagatcggcattcacatttttaagccgcgcatagctggcgtagccggtgccgaaatcatcaatcgcaatctggcagcctaattcctgaagatgctgcaaggtgatttgcgcctgcttaacattggtcagagcattactttcggtgacttcaaaaataagttgccacgcttcaatctgatatttagccagcaactgactgacttcaacaggaaaacgagcctgacatacgctggttggagacagattaatagcaaaacggtgagcgggcatcttcgctctgttttcagccataaattgcagcgtatgctcaatgacccacatgtcgatactgctgcttaaaccaaattcgtgcgcgaccggcaagaagctatcggggctgatcagttcatcattctcacctttcatgcgcagaagaatttcatggtaaacatcaccacgcataccggtaatcggctgggccatcaggaaaaaatggttgtgttccagcgcctgctgtagtcgattcatcatcgcgactttatctttcaattcgcgttgcaaatacattgccccgcgacgctgcatattttccggggcgttggtcacgatggaaagttcggcgaccgtatttagctctcccagcagcaggtagatatgattcactgggctgcgcacatagcagtaactgacgccaatctgcggttgcatcggcatgccatcccaaaagaaacgaaattgcttgagatggctatccagtgcggtaatgcgctcctggtggctttctgtattcagtcgcagcgcgagatcgttaccgctaagctgataaacatcttcacccggttccagcaagggactcagccagtgagaaagtttttgcttgtattgaatccgcagcatgatgccatagttcttaaccagcatttccatgccagggatgcgtaaataacaaagcgcagaccagggggcatcacgcaacgcgcgattcagggcgcgaacatttggcagatgaaccaccgggtccacatacgcaagccgctgaatgcgtctgactaccgctctctgacgggttgccagtacagccatataattgacaataaaagagaataccagataactggaggaggttatggtcagctgcgtggtatagccaggataaatgggaatgtaattttgatagctgtggatgctgatcatcaacacgaccgcccagagcaggctaatcagcttataaccatagcgcatcgctccccacatcatcaggggcagcaataaactcaaggtataattggtgctaaaaattgtgcttttttcatttaacggcatgcataacagcaacaataaagcacctaatgccagtagccagagcgcgaactcttttttggtgactttggcatcaacctgctgttttaattggctataatagctacgtaaataaaatggatttcgcactacccgaatgatgaagtagcacagcgggacaccgatcagattacccaccagtaaggcctgataattgattaaagtcccgaggttaaaaggcatgacaccgaccagattttctctgctcgccagtaatcctacaaatgcagcaaactggaaaagtatcagaaacagcgttgcaggaaacacaatctgccagaatatacgctgggaaattaaacgggtatcaccatgactaacgttgttacgccggggagtaaagaccctgtaaccgccccaacagagaatgataatgataataaaattagccgttaaacttagcgtttcgtaaaaacccagctctgcatatttgcggacaaaaatccctaaggcgatccctggcaatgccgcccagctgaaaaacatcatcatgctgatcatcagtgccagaggcagataaaagagaaaaacctcaccggaagaaatatgcgcgaaagtattaatgtgggcgaaaatgggcaagattaaagaaggcaggaacagcggaagcccccaccatttatcacgtatttttatataagttgcattcagtttcatagatgctcagcagaatcccccacatcctgaaggaggtgtattcagacaggcatcccacctgacttcgaatgatgattattcatcactatagagagcattgattctaagtgtcatatgaaagtaccaattgatatatatcaaacaaaataaccctgattaatgaattattacgtttatcatgttaattcatcattattacatcatcattgtaaataattaaattaacttccataacattaaaatatgtatccactgacgcttttttacataacgaagaattgaccattttgtcctgttgtgccttaatgtaagtaccgtccacagcgtgggacatacttcaaggaaccttttgtgagtcaggcaaccagtatgcgaaaacgacaccgatttaacagtcgcatgacccgtatcgtactgctcatcagctttatcttcttctttggccgttttatctacagctccgtcggtgcctggcagcaccatcagagcaaaaaagaagctcagcaatccacactctccgtcgaaagtccggtacaacgttaacggttaccttctccactttcacagaacataacggcacttcgctgtcggatgcttttgctgtttgggattatcaaagcggcagatattctttcatcttaaattttacgtctttatcctgactgatgtttatcctgtttggctgcgaaataaatataaaattaatatatatgttgtaatgatatatttttataaattattccctgcgtgaattttaataaatttaatctatccctttatacgcaatacatttactttcctcttttgatgatcttaaatgtcttatttttcgtaatgtgtataacaaggaatagtgatgaaatttaaaaaatgtcttctgcctgtggcaatgttagcgagtttcactctggcaggatgccagagtaatgctgacgatcatgctgccgatgtttatcaaaccgatcaactgaataccaaacaagaaactaaaaccgttaatattatttccattcttcccgcaaaagttgccgtagacaactcccaaaataaacggaacgcacaagccttcggcgcgcttattggcgcagtcgctggcggtgttatcggccacaacgtcgggtctggcagcaattccggaacgacggcaggtgcagttggcggcggagctgtaggcgcggcagcgggttctatggtgaatgataaaaccttagtggaaggtgtttctttaacctataaggaaggcaccaaagtgtatacctctacccaggtgggtaaagagtgccagtttacgacaggtttagccgttgttattaccacgacgtataacgaaacgcgtattcagccaaataccaaatgtcctgaaaagagctaataatcaggaggagtcatgaagaaagtttttctttgcgccatcttagcctccttaagctatccggctatcgccagtagtttgcaggatcaactctctgctgtcgcagaagcggaacagcaaggtaaaaatgaagagcaaaggcagcatgacgaatgggtcgcggagcgcaacagggaaatccagcaagagaagcaacgtcgcgcaaatgcccaggccgccgctaacaaaagagcggcaacggcagcggcaaataagaaagctcgtcaggataaactggacgccgaagcctctgcggacaaaaaacgcgatcaaagttatgaagatgagctacgcagcttagagattcagaaacaaaaactggcgctggcgaaagaagaagcccgcgttaagcgagaaaacgaatttatcgatcaggaactgaagcacaaagctgcgcaaaccgatgtggtgcaatctgaagctgacgccaacagaaatatgactgaaggcggtcgcgatctgatgaaaagcgtgggcaaagcagaagagaacaaaagcgacagctggtttaattaatcgatgttagtaacttcaatcctataattcttgaagataaaaaaccctctgtagtaacagagggttttgttcattcatagtgcagggtcaaatcattcccactcaatggtagctggcggcttgccgctgatgtcatacaccacgcgggaaataccgttcacttcattgataatgcggttggaaacgcgaccgaggaaatcgtacggcagatgcgcccagtgtgcggtcataaagtcgatggtttcgacagcacgcagagagacaacccagtcatacttacgaccatcgcccattacgccaacggaacgtaccggcaggaacacagtgaacgcctggctgactttgtcgtacaggtccgctttacgcagttcttcaatgaagatggcgtcagcacggcgcagcaggtcacagtactctttcttcacttcacccagaacacgaacgccaaggcctggtcccgggaacgggtgacggtacagcatgtcgtacggcaggcccagctccagaccaatcttacgcacttcgtctttgaacagctctttcagcggttcaaccaggcccatcttcatctctttcggcaggccgcccacgttgtggtgagatttgatgacgtgtgctttaccggttgcagacgccgcagattcgataacgtcagggtagatggtgccctgcgccagccacttcacgtcttccagtttcagcgcttcttcatcgaatacttcaacgaaaacgcgaccgatgattttacgttttgcttccggatcgttttcgccagccagcgcactcaggaagcgatcttctgccggtacgtgaacaatgttaagaccaaagtgatcgccaaacatatccagaacctgctctgcttcgttgaggcgcagcaggccgttgtcgacgaatacgcaagtcaggtttttaccgatagcgcggtgcagcagcattgcggttacggaggaatccacaccaccagagaggccgaggatgactttatcgtcgcctacctgctcgcggatgcgagctacagcatcgtcgataattttcgctggcgtccacagggcttcacactggcagatatcacgcacaaaacgctccagcatgcgcataccctggcgggtatgagtcacttccgggtggaactgtacgccatagaagcgtttttcttcgttagccataatggcaaacgggcagctttcggtgctggctacggtgatgaagtcggacggaatagcggtaactttatcgccgtggctcatccagacatcgagcagcggtttaccgtctgcggtcagcgcatcttcgataccgcgaaccagtgcgctgtcgtttacgacttcaacctgcgcgtagccaaattcacgttcgttagaggcttcaacgtgaccgcccaactgcattgccatggtctgcatgccatagcaaacgccgaataccggtacgcctgcttcaaagacatactgcggcgcacgcggactgttttcttcagtagtactttccgggccgccggaaagaataatgccgcttggattgaagtcacgaatttgtgcttctgtcacatcccacgcccacagttcgcagtaaacacccagctcacgcacgcggcgcgcaaccagttgagtgtactgagaaccgaagtccagaatgaggatgcgatgcttatgaatgttttccgtcattgacgcttattccgaggcaagtgaaacagataatataaatcgcccgacatgaagtcgggcgaagagaatcaggagcccagacggtagttcggggactctttagtaatggtcacgtcgtgaacgtggctttcctgaatgcccgcaccgctgatacgtacaaactccgctttagtacgcagttcgtcgatagtaccacagccggtcagacccatacaggagcgcaggccgcccatctgctggtgaatgatctctttcaggcgacctttataggctacgcgaccttcgataccttccggcaccagtttgtcggcagcgttatcgctctggaaataacggtcagaggaacctttggacatcgcgcccagggaacccataccacggtaagatttgtaagaacggccctggtagagttcgatttcacccggagattcttcagtacccgccagcatggaacctaccatcaccgcgcttgcgccagcggcgatagctttggcgatgtcgccggagaagcgaataccgccatcagcgataaccggaataccggtgccttccagggcttctactgcgtcagcaacagcggtaatctgcggaacaccgacgccagtcacgatacgagttgtacagatagagccagggccaatgccgactttaaccgcactgcaaccagcttctgccagagcgcgtgcacctgcagctgttgccacgttgccgccgataatttgcagatccggatatttagcacgggtttcacggatacgttgcagtacaccttcactgtgaccgtgggaggagtcgatcagcagaacgtcaacgcctgcggcaaccagcgcgtcaacacgctcttcgttacccgcacctgcgccaaccgctgcaccaacacgcagacggccttgctcgtctttacaggcgttcggtttacgttccgctttctggaagtctttcacggtgatcatgccgatcaggtggaattcgtcatcaaccaccagcgctttttcaacgcgtttttcgtgcatttttgccagcaccacttcacgggcttcaccttcacgcacggtgaccagacgctctttcggcgtcatgtaaacgctaaccggctggttcaggtcggtaacaaaacgcacgtcacgaccggtgataatacccaccagttcgttttcttcggtaacgaccggatagcccgcaaaaccgttacgctcggtcagttctttcacttcgcgcagcgtcgtggttggcagaacagtctgcggatcagtcaccacaccagattcgtgttttttcacacggcgaacttcttctgcctggcgttcaatggacatgtttttgtggataaagccgataccgccttcctgagccagagcaatagccaggcgcgcttccgttacggtatccattgctgcggaaagcatagggatattcagacgaatagttttcgtcagctgggtgctgaggtcagcagtattcggcagaacggtagagtgagcaggaacgaggagaacgtcgtcaaacgtcagagcttctttagcgatacgtagcatgggcaatatctcgaccagagtggttaataaatattgccgcggcattatacagagcgtaaccgattgcatctacccctttttgcaaaaaatgcttgctatccccgaagggcgggttactatcgactgaataacctgctgatttagaatttgatctcgctcacatgttaccttctcaatcccctgcaatttttaccgttagtcgcctgaatcaaacggttcgtctgctgcttgagcatgagatgggacaggtttggatcagcggcgaaatttctaatttcacgcaaccagcttccggtcactggtactttacactcaaagacgacaccgcccaggtacgctgcgcgatgttccgcaacagcaaccgccgggtgaccttccgcccacagcatgggcaacaagttttagttcgcgccaatattacgctctacgagccgcgcggcgactaccagataatcgttgagagtatgcagccggccggtgaagggctgctgcaacagaagtacgaacagctcaaagcgaagttgcaggctgaaggtttgttcgatcagcaatacaaaaaaccacttccctcccctgcgcattgcgttggtgtgatcaccagtaaaaccggtgctgcgctacatgatattttgcatgtgttaaaacgtcgcgatccttctctgccggtgatcatctaccctgccgccgttcagggcgatgacgcgccggggcaaattgttcgcgccattgaactggcgaatcagcgcaatgagtgcgacgtattgatcgtcgggcgcggcggcggtagcctggaagatttatggagttttaacgacgaacgcgtagcgcgggcgatttttaccagccgcattccggttgtcagcgccgtcgggcatgagacggatgtgaccattgccgattttgttgccgatctgcgtgcgccaacgccgtctgccgccgctgaagtagtgagccgtaatcagcaagagttactgcgccaggtgcaaagcacccgtcaacggctggagatggcgatggattattatctcgccaaccgcacacgtcgctttacgcaaattcatcaccgattacagcaacagcatccgcagctccggctggcacgccagcaaaccatgcttgagcgcctgcaaaagcgaatgagctttgcgctggaaaatcaacttaagcgtaccgggcaacagcagcagcggttaacacagcggctgaatcagcaaaatccacagccgaagattcatcgcgcgcaaacgcgcattcagcaactggaatatcgtttagcagaaaccctgcgcgcacagcttagcgccacgcgtgaacgtttcggtaatgcagtaacgcacctcgaagccgtaagcccactgagtacgctggcgcgtggatacagcgttactactgctactgacggcaatgtactgaaaaaagtgaagcaagttaaagcgggtgaaatgctaaccacacgtctggaagacggctggatagaaagtgaagtaaaaaacatccagccagtaaaaaaaagccgtaaaaaggtgcattaagccagcacgaattcaacgcgttttttgcttatcaagccatgcccgtgctgacagaagtaatctactgcaccacaggcttttaacacctgcaacggttgatggcagtctggacaaagagctttcatttcaataaattccccgcaggatcggcaacgcgcatggccgttatcctgatcaagcacatgctgacattgtggacaatgcagttccatatgaattcctccggtagccattccctctacattcatagagggaatggcagataaaatacttacggataattatttatttttcttgatgtgcttcatcagacgcttacgtttacgcatctgggttggcgtcagggtgttacgcttattcgcatacgggttttccccttctttgaactgaatacgaatcgggcttcccattacgtccaggcttttgcggaagtagttcatcaagtagcgcttgtaggaatcaggcaggtctttcacctgattaccgtgaatcaccacaatcggcgggttataaccaccggcgtgggcatatttcagcttcacacgacgaccgcgtaccagcggcggttggtgatcttcaacagccatcgtcatgatgcgcgtcagcatagaggtccccacacgacgggtggagctgtcatacgcttcacgtacactttcaaacaagttaccaacaccactgccgtgcaaggcagagataaagtgcacacgagcaaaatcgataaagcccagacggaagtccagcgtttctttcacctgctctttcacttcctgactcaggccatcccacttattcaccacaatgacaagactgcgcccactattgagaataaagcccagcaggctgagatcctgatcggaaataccttcgcgcgcatcaatcactaacatcaccacgttggcgtcttcaatggcctgcaacgttttgattacggagaatttctctacagcatcggtgattttgccgcgtttacgtacgccagcggtgtcaatgagcacatactcacgtccatcgcgttccattgggatgtagatgctgtcacgcgtcgtgccaggcatgtcgtaaacaacaacgcgctcttcaccaagaatacggttagtgagtgtagacttacctacgttcggacgacccacaatcgccagtttgatcggcagactttgcgggtcgaagtcgtcttcctcttcttcttcgccgttctcttccgcttcaaattgcgcccagtattcagcgtcttcgtcgacttcctcttgcggtgcgagatcttccatccacggcagcagcacatgctccagcagacttaatacgccacgaccgtgagacgcggcgatcgggtagatttcacctaaaccaaggctgtagaaatcaaccactgcctgatcgggatccagaccgtcagttttgtttgccaccaggaaggtcggtttttcacgggagcgcagatgtttggcaatcgcttcatctgccggcatcaggcccgcgcgcgcatccaccataaacagtacgacgtccgcttcttcaatcgccagcaggctttgttccgccatgcgggtttctacaccgtcttctgtgccatcaatcccgccggtatcaatacagataaactcacggccttcaatttccgcacgaccgtacttacggtcacgagtcagacccgggaaatccgcaaccagcgcatctcgggtgcgagttagacggttaaataacgtggattttcctacgttagggcgcccgacaagcgcgaccacaggtaccatgtttaaagcctcatttttataaatcatcagacaacgcacgctatattcgcgtcgttgttaaaaacaggaaaacggcccctgtccaggagccgttttcaaagtgaacgacagagacgattaacgtgtaatagagtacacggttccgtcttttgcctggatcagcagtttgccgtcagcggcaaccggttcagtctggaaaccggaactatcaactttttgctgggcaacgaaacgaccatcttcgacgttaatccagtgcagataaccttcactgtcaccgaccaccaggttgccattatacagcaccggagaagtcagcaggcgatgcagcagatcgctttgtgtccacagcgtaacgccgccatcaatggtcaacgccatcacccggtcattttgatcgaccagatagatgcgattgccgtcgacgatgaaatcattcacgctacccagttcgcgtttccacataatctgaccactgcgcagatcaagcgccgtcaggttaccattataggccagcgcgaaaacaacgccgttaacaacgacgggagtcgtgtcaacatcgctcagacggtcaatttcggtagaaccggtcgcctgggaaatacgctgctgccaaatcatctggccctgttccatcagcactgcgctgacgcgaccattatcgccccccacgacggccgcaccaaaagccgttgtcggcgcagactcgccacgcaaagagaggctaggcatatcgaggttaactgtccatttgacagcgccgtcagcttcgttcagcgcttgtaactgaccgttactggtgtggattaacaccagaccgtcgctgaccaccgggcggctaagtgcttcacccgcgactttagtttgccatgccacagtaccatcgctggtattcagcgcgtaaacctgcgccttttcgctgccaatgtagacatgcccaccagacacggtcacaccgccagaaagtaatgcaggctctttagagaaccagccatctttctcggccaggctgacagaccagatttctttgccatcatccgcattcagcgcttttactaaaccagcgcggtccgctgcatagacaacgttgtccgccagtgccggatgaagattggaatagaagttgccaatgccgctaccaacggaagtgctccacgccgtggtcggcgtaaactggttttcaacggttggcaatggggacatctttaccacatcttcttcgctgttaaacaggctacagccgcttaaaagggtaacggaaagcagtcctggcagcagtaatttacgcaattgcatcgggtccctctcagatggacaaattattaattttcatctgcatcatttcgctcagtgccggagtaacatcgcttttcacgcctgcttcccatgcactacgcgcaccttgcttatcacctttgctcagcaatgcttcaccacgcaggtcggcaacaatggcagcccacccttcacctttgatggtatcaagggttttcagcgcggcatcagcctgcttgagctgtacctgaacgcgagcaagacgcagatttatcacggctttgagattttcatcgctcgtgtctgccagcccctgttgtaactgggcggcagctttctctagttcatttttgtcaacaaattgctgcgcaagttccaaagaagccagcgcaccataagtatttttattttcagcagcaaatttttccgccgccgggatgctatccggtttgccttcgctcactgcggtaaccgcattttgataggcaagagaagcggagcgtgcagaatcaacctgatggctgttccagtagcgccagccaatcagtgcgccaacgcccaaaatcaccccaacagccagtgctttgccattttcagcaaaaaagcgtttaaccgcttctacctggtcgttttcgttctcgtaaatttccacgctgtccttctccttccttaacccagtaacgtgcgcaaatgcgcggctacgctatcctgcgcaactgccgtttgctcaccagagcgcaaatccttcactactgctgtgccgttagccacttcagactcacccagcaccacagcaacgcgggcaccccatttatcagcacgggcaaactgtttcttaaagttgccgccgccgtggttggtcatcaatttcacgcccggtaattcatcacgcagacgctcagctaatgccatagccgcagattgtgtatcagcaccactagccaccaggtatatatcgacaacaggatcggctttaaattccggattaacggcctgtactaacaatacaagacgttcgaggcccatagcaaaaccgacagccggtgttgcacgaccgcccagttgttccacaagaccgtcataacgaccgcctgcacacacggtgccctgggagccgagactgttagtcacccactcgaaaacggtacggttgtagtaatccagaccacgcaccagacgctggtttacggtgtaagcgatccccgcgctctccagcagtttgcacagaccggcaaaatgctcacgagattcctcgtccagatagtcacctaatgccggagcgtcgttgagaagcgcctgcacttccggatttttactatccagcacgcgcagcgggttagtgtacatgcggcgtttgcagtcttcgtccagcttttctttatgctgctcaaggaatgccaccagcgcatcgcggtaattggcgcgtgcttccaggctaccgatagagttcagctcaagagttacgtgctcggaaatacccagcgcgcgccaccagcgggcagtgagcataatcagttcagcgtcgatatccggaccttgcagaccgaaaacttcgcagcccaactgatggaactgacgataacgccctttctgcggacgctcgtgacggaacatcggcccgatataccacagacgctgttcctgattgtacagaagaccatgctcgatgccggcgcgtacacagcccgccgtcccttcagggcgcagagtcaggctgtcgccattgcgatcctcaaaggtgtacatctctttttcaaccacgtcggtgacttcaccaatcgcacgtttgaatagcggggtctgctctacaatcggcaagcggatttcactgtaaccgtagctgccgagcacgtttttcagtgtgccttcaatgcgctgccagatggccgtttcgccaggcaggtaatcgttcatgccgcgaatggcttgaatgttttttgccacgtttattctctttctgaatataaaaatgaaccctcaacgcttccctcaatgtttcgggagccatgcgggttcaatcatacacgggaagcgaggcgcttcccatcacgttattatttttcaacctgctgaacgtcaattcgacgcgcttcgtccagctgactggctttcgcacgaatgcgtgcttccagctggtcgatcatatcgttgttgtccagacggtctttgcgcacgccatcttcatagaggccgcttttcttgttgccgccggtgacgccgagtgtagaaaccagcgcctcacctgggccattcaccacgcagccgataatgctaacgtccatcggagtgatgatatcttccaggcgttgctccagcgcgttaaccgtaccgataacatcaaattcctgacggctacaggtcgggcaggcgatgaagttgatccctcggctacggatacgcaggcttttcaaaatatcgaaaccgactttgatctcttcgaccggatcggccgccaggcttacgcgcagcgtgtcgccgatgccttcagacagcagcagacctaaaccaatggcggattttactgccccgctgcgcgcaccaccggcttcggtgatccccagatgcaacggctgatcgatctgttttgccagcaaacgataagactcaacagcgaggaagacgtcagacgctttcacgctgactttgaactgatcgaagttcaggcgatcgagatgatcaacatgacgcatggcagattccagcaacgcctgcggcgtcggttcgccatacttttcttgcagatctttttccaggcttccggcgttaacgccaatacggatcggaatgtttttatcgcgcgcacagtcaaccaccatgcgaatacgctcttcattaccgatattgccagggttaatacgcagacaatcgacgccgtattccgctactttcagcgcaatgcgatagtcgaagtggatgtcagccaccagcggcacgttaacctgctgtttgatgagtttgaacgcttctgccgcgtccatcgtcggtacggatacacggacgatatcagcgccaacgcgttccagcgccttgatttgattgaccgttgcttcgacgtctgtcgtacgcgtattggtcatggactgtacggcgatgggagcaccatcgccaatcggcacattcccaacgtaaatacgtgtactttttctacgttgaattggagcctggttatgcatgaaaaatctcccgcgttacccgtctgttactgcgccggactttgttcggcattgagggtcagacgcgcaacctggttagttctgataaaacgactcagatcgacaggtttcccttgatactggatctgtactgcggctggcgcaccaattttcagtttgtacggtgcctggccggttaagttcaaattaccgtctttacgctgcataccgctaaacaattttttaccggtagcatcagtgacctccagccagcaatcggcagtaaagttcatcaccagcgcattcggatcagccaccggcgtggtcacgccagcctgatcggttggcaacggcgcagcaccatctggcgttgttgctgccgttggtgccggggtcgcggcggtatcaacatttgcctggctagggctaacaaccgcattctgttgcggatcaacagctggtgctggcgcagttacggcaggtgtttgcgtgttggttgcggtagtatccacagacgctggcggcgtggacgttgtagccgggtctgtagttgtgctcgtatttaatggaacactctgcccctgctcgctattactgctcagttccgcgctagattgatcggccatagtggtgatctcttcctgctgagctttgcggtcttgccaccaccaggcaccgctcaggccgataaccacaaacaacaccagccaagtgaaggtcatcagccagccgtcgcgttttttgcggcgtttaccgagggaaaaactctgcatcggcgcaacttttgcagcccgaagtggagcctgcttttccagccctggcagcagttcttcttctggaatatgtaccagacgcgcataagagcggatatatccgcgcaggaatgtactagcaagatcggcgggtgccttatcttcttcaatgtcgcgtaccgtggaaaccttcaggcaaagtcgctcggcaacggcctgctgactaagtcctagttgttcgcgagcattacgcaggcgagcgccggtagtaagtgcttcattttggtcgtgcgtggcttcagtattcattcgctgcaggtacgtttaaatgagaattgagatgccggtgaaccatcatgctcacccacaccgcgaaacatccgttaagttaaccgttatcatacagtataagaccgtctgtgtgctcgtgacaaagcccacattcactaaggctaacttactgttgcatcgttacatactgccttaaagtcagcaaaaacgcaccgttaatattgaccagacaattgcaacttaatacttcattcataaaacattacgccacggtacataaagtaaccgtggcgtaatggctatcagaccgctttaatgtcgatggcttcaccctgcatccgtttacgcagggtacgtttcgtacggtcgataacatcgcccgccaactgaccacaggcagcatcgatatcatcaccacgagttttacgcacaatagtggtgaaaccgtagctcatcagcactttactgaaacggtcgatacggctgttgctgctgcgtccatacggcgcacccgggaacgggttccacgggatcaggttgatcttacacggcgtatctttcagcagttccgccagttggtgcgcgtgttcagtgccgtcgttaacgtggtcaagcatcacgtattcaatagtgactcggccctgattggcgttggatttctccagataacggcgcaccgcagcaaggaacgtttcgatattgtactttttgttgatcggcacaatttcgtcacgaatttcgtcgttcggcgcgtgcagggaaattgccagtgcaacgtcgatcatatcgcccagtttatccagcgccggaactacaccggaagtggaaagcgtgacgcgacgtttagacaggccaaaaccgaaatcatcaagcatgatttccatcgccggaacgacgttgttcaggttgagcagcggctcgcccatgcccatcatcactacgttagtgatcggacgctgaccggtgacttttgctgcgccgacgattttcgccgcacgccacacctggccgataatttcgctcacccgcaggttgcggttaaagccctgctgggcggtggaacagaatttacactccagcgcacaccccacctggctagagacgcagagcgtggcacggtcgtcttccgggatatacaccgtttcgacgcgctgatcgccaacggcgatcgcccatttaatggtgccgtcagaactacgctgttcttcaaccacttccggtgcgcggatttccgccacctctttcagtttgccgcgcaacactttgttgatgtcggtcatctcatcaaagttgtcgcagcaatagtgatacatccacttcatcacctgatcggcgcggaagggtttttcacctaaatctttaaaaaactcccgcatctgctgacggttgagatccagcaggttgatttttccatctttcgtggtgacgttttcaggtgtgactaattgttcagacatatgctattccggcctcgttattacacgttatggcccctggagggttgaaaaaagaaacgccccggtgagcggctgctcgtccgggggcgctgcattgtacaaattctggcgcacggatgccacgtttgcacgcggcatttacgaaattattaacgggtgcgcgggcacacttcgccttcgccaaagaaataagcgatttcgcgagcggcagattcgacggaatcagaaccgtgggtaccgttttcggtcaggctgtcagcgtaatcagcgcgcagagtaccagccagtgcgtttgccggattggtcgcgcccagcagatcgcggtgacgctgaacggcgttttcaccttccagcacggaaaccacgatcgggccagaggtcatgaattcaaccagaccatcaaagaacggttttccatcgtgttcagcataaaagccacgtgcctgttcaacggtcaggtgcagcattttggtgccaacaattttgaaccctgcagcttcaaagcgcgcaaagatattaccaatgacgttttttgctaccgcgttcggtttgatgatggaaaaagtacgttcaatagccatttttacctctgtaaattgttctgttgttgtctgtaccagcgtacgagatggcgcggattataatgagcaacagggccgttgactattgatgaaggtaacatttttttaaaataaaatgagttttagcaacaatcagggacaaaacagattattgcatgacaaatttcactgtcgcgatttgccccacgtcatccatcaccagcaattgataatcacctttatccgtcaaatgcagggtcacgttgcgcccgcgttcagttaacggttcgccattcagaaaccaccagcgttcacctgcccctccactactttgcaacggcaaagtcgcttccgctgcgcccggtaaacgtttaataatcgcgccatcgcgaacgcctgtcagctgcagcgggagctgggcatcgtgaccgtatggcgggcaacttgtgctggccggtggtaagcgcacagcgcgacgttcacttgcgggcagccagggttccagcggtagcggccagacatttatcatttcttgtcgcgcttgcgggcaatcagcggcaacacgtttgccattttcatccagccagatggggaaacgaatgccattaatgccttcctgctccggcagtaatagagttggcggctgactcccgtccagcagccaggttgccaggcggcggcgacagttaccgtcaccttccggcaaagactgtccgcccggccagcagataacgccacgagtgacactgttcgggcgcgggtcttccggcagattcgcactgcggctcagtaagatattattgacctgattcaacaatggtacggcactggcaaagccaaactgaccaacaacgggcgtgccgtccggtctgccagtccagatcccaatgacatagcgagcgttaaccccaatcgcccaggcgtcacgatagccatagctggtgcccgttttccatgccagtggggcgacgcgcggcaaggcactatccggcaagggttgcgcttcatcagccataatccggcgaatgatccacgccgccccgctgctcattaaaggccgttcaagcagcggatcgtcaggctgtaagcgcaatttgcctgccttgccgtggcgagcaaacgcggtatacgctgccgccatatcttccagttttgcaccagcgccgccgagaatgagactaagattcggcgcagcaccgttgggcaaatataacggcaatccaacattgcgtaactttgccgcaaaccgtttcggtccataggcttccagcacctgcacagcaggtaagttcaggctgcgcaccagcgcctcgctcatgctgatcgggccatgaaaaccgctatcaaagttacctggtcgataatcaccggtgcgccgggggacgtcttgcagcagacttgccgggtggatcaagccttcatccagcgccagaccataaacaaacggtttgagcacacttcctgggcttcggatgctattgaccatatcaacatgaccaaagcgactatcatcgttgagatcaacgcttcccacccagccgcgaacacgcatatcggtatgatcaaccacgatcatcgccagactgctgcgcggtggcaaccgccctttccagttttgcgccagttcttccagacgtcgttgaagaccggcatccaacgtagtagtgattttgtcgcttttgcttttaccgagcatcatgcggctaaacagcggtgccagttgcggcatttgtcggggggccagccagatgggttcttccctactctcttttacctgctcacgggaccacacaccttgcacggccatccgttcgagcactttattacgcgcggcttcggcacgctccggccaacgatccgggcgaagacggctgggcgcttgcggcaaaaccgccagcattgccgcctcggaatagcttaaattcgcagggctttttccgagataagcccaacttgccgcaccgatcccctgcaacgtaccgccaaacggagcgcggttaagatacaaggtcagaatttcacgcttagacagatgccattccagttgcaacgcgcgccagagctggcgaattttgccgccaaatgttttggggtgaggatcaagcagacgagcaacctgcatagtgagcgtgctgccaccggaaataacccgtccgctagtgagatcttgccatgctgcgcgcgccacgctgaatggattcacccccggatgcttccagaaccagcgatcttcataattgatcagcgcttcaaggtaacgtggagaaacatcttcgattgttaccggataacgccagatgccgtcagcatcggcgaagcgccagagcggcgtaccatcctgcgccacgaccactcgtgcgggattgacttcatgcagcggtagaggccagagtttatctgctccccacgctgcaagaaaaaggagaaagggcgcggctgccaacgttatccagcagccgcgtttggttaacaagcgaggcatttacggtctgacaatcagcagatcttcagccgcgccggtcgcccgccattggggaacatacatactttccaccatcggttgcggtacctgatacgttcccggcgtcaccgcccgcgccagatacaccagcgttaccggttggtattcatcaacggcaaccgccgccacaaagcgatcgtcacggaactcaatgtgcttaatgctcgcctgctgcatctggttcagtaagttctgcacttcgccaccactttgctccaggctggcgctaccgttcgccagattctggttttccagttccagacccgcaggcagcagatccacgactaacgcatccggcacgctgttactggcttttacctgcaaccacaccagcaccagatcgccgctacgtaagctgtccaggcttttgctcttaccatcagtaccaagaatatgacgctcgatttgcagcacattgttcgccggtaaaggtgcggattgcggataaccgctggcatccatacgcaaccataacggctgatcgccactgttgctcacctgcaaggtgacaagttgatcgctattcagattgctgttttgcgctttctcgcctgtcagctgctcagcactgaaagaggtttgcgcctgccatttaccgggtaaatcctgaatcgtacgggcagccaggaacaacgcgttactttcctgcgtgcttagccagcgttcaccaaacgcctgctggctaagtgtgttcagcaaagtgtactgctcatcgggtagcagtttattttcttccagcaaggagagcattaacgcgttgtcgcgcagactactaccgtaatcacccagccatatccgctcatcactattacgcggcgttttcagcgccagcgcaatcgcttcttcaccacgcgtcgcatcacccatggttttcagcgcaacgccaagttgcagcagcggtaaaccagaagcggcatctgcacgatgctcccagatttcacgcagcgcacccagcggagccttttgctgacgggccaacaccagcgcagcgtaagactgtacggcgaatttactggctttgagattatccgcgtacgggatgctcatcatgcccggatcttgtaaatagcgcagcagacgctcattaccccggttaatggcgtctgtcggcacgctgtaaccctgttcgcctgcgcggaccaggaaatccatcacgtaagccgtcagccagtactcttcgtcaccgtttttatcccacagcgcaaagccgccgttatcacgttgcatttgcagcaaacgggaaatgccgatatcgacgcttgcacggcgtttctcatcactgtcgcctttgatgcccaacgcctgcagttgggctgcgttggtataaagactcggaaacaggccgctggcggtttgctcaagacagccgtacggatacgcttttaactctttgatataacgtgcgatgttcagcggtggtttgccgctcaacaacaattgcccttccagcgtaacagggctgaagttttgcaatccatccgccggaatcgcccatgtctcaccaggctgtaacgccgtaccgtaattaaccgtttgtgccgggaacgccggacggacgccgattttccactgcttatgctgatcggcaacggtttcacccggtaacgctaacccgctaatggtggcctgaatttctccatcgccataacccggcaatgctcgcaccgggataaacagcgtagtacgcacacctggcgctaattcaacggctgcgggactatcgctgaccagttcaagcaaaccactggcggtcagggcaacgttcagtttttgcggtttatcggtaagattagtgatatccagcgtcagacggctggtatcgccactcgccataaagcgcggcatgttcagttcagcaatcaccggtgcggcaactatcactttactttcgttgctaccgaagtcatctgccgtccaggcttgcgccatgacgcgcaattcaccgttaaaatcgccaatcggcagtgtaacgctgccttcgccctgttcgttgagcgttaccggcagcgcctgctgcacgacaatattgacgtgattgaccggcggtttaccaccacgtttcagctcatcaccatcgccaccgaaacgcagagctgccagacgcccctgaccttcaataacctgaccgtaaatatcgtaaatgtctgcgccatagcgtttctgaccaaagaacgcctgccacggatctggcgtgacgtagtcagtaatattcagcacaccactatcaacggcagacaccagcacattcacctgtttaggcttctcgccatttttagtgctggctttaattttcacggttaatggttgattgggacgcatttttgctggtgtttccagcgccagatcgaggcgacggttttcatcgccaagcggcagatgcaacacaccaaccgcgcgttttggcgtcgcggagcgagatttatcgccaggacgtaccaccagcgtacttaaatacagatcatgacgattccaggttttatcgaccggaatcgtcagatccagcccttgagcccgaacatcaatctcttgccaccacagcggcccttcactggactcgaccatcgcataacctttacccgccgttggcgcggcgatatgcaacttaatggtgtcgccagggcgataactggctttatccagtttcagcgtgacacggtcgggtcgcactgcgccgctaccgtcgctgttgtcctgccagctatagccagcccagaaacgaacactactgaccgcttcattcggcgctttgacttccagacgataagcgccccactctaccggaaaactgaccttgccggtttcgtccgctttcagatccagagtttgttcattttcgatcagatctttttgatcaaactgactctgccagccttcatcttcactccagttccagtagtaatcgcggcgttcgcgaatcaggcgcacctgcaagccgctcacggcttttttcacgccttgcgcatcgctataaacgatgtcaaaagcggcgttactgccttcatcaacaatgggctgtttcaccgtgctgtcagtacgataatcgtaaacgcttttgctggcgaactgcggacggatccccggcaatgcatcggcaggccagatagcctgctcagcgcggcgcgtcaccgggcgaccgccgctttccagcaaactaccctggaaaataacctgtaatggggaatgcgtttccttccactggctttctgtagaaacttcgccgcgccctttatcatccagcgtcaactgaacttcatccagcgtgcgggaaagattttcggcagctatatcgccgaattcaaaaccaggtaaggcactcacagcttcacgcagtgggcgcaggaaaagttgcccttgcaaagtattaccattagcaggtgcaccatacaggtagtaccccaccacggagaatttcacttcatctttcggcgttagcggggttttctcaccggtcagattcagcgccatgcgctctggcataaaatcttcgacgtggaaatcccacatccgatactgattatcgcccgtgttagcgcgaatatgccacataccggttgccgcattgctatcgagtggccaggtaaagtggtagaggccattctccggctgactaacgacgctcctgagtacctgcccatcgggtttaatcacgtctaacttgatgggttgattgggcaacgctttaccgtctgcatcacgcagcaaaccattgaggattaccgtttcacctgggcgataaagatcgcgtgggccaaacatgaaaaactgtttgctatagcctggcgcgccagcaatgttaaattctgctaagtccagcgccggaagttttaaatcgagtagcgttgtctgaccgtctttacgcgccaacagtaatgccgcgtttttatcattttccagctgcacatgcccctgagcgtcactggttgcctgagtcagagtctgccctttctcatttaataaagagacttcaattccttgctgggccgcgccgttttccagactttgggtaaagatatccagacgattgtgataacggtgagcactaacgccgatatcacttaacgtaaacagcgtcgcgggattactgtaatcgtaacgtccagcctgattcatcacagccagatacacgcccgcctgctgaagcggtttgatatcgcccagcggcagcaataatttttcacgggtgttacgcgcaggattgagatcaaaccgtccggtgtagaccagatccgccatctgcagcagtttgtcactctgccagttcgccaggctattgcggtattcccattggctaatgaatgctggcagagattctggcttaacgcggaagaagttaacatcgacattattaacgttgagcgccattaccggcagcccttcaacgactttgccaggcagcaggctaccacggctggcaaaaccgacgctgggttggatgtcgcgggtagttatagttttttcgtaatctttactgaaggttgcgttgttgagtgctttgacctccttgccaatagtaacgatcaaatcacgtttcggttcgaggtggcgtaaacgtaactctttaagattatcactcagctcccaggcaccatccactttgccgctttttttatcgacgacatgaataacgcgactgaaatcctgatccgggtcgagagggatggagaacgtcagcaccagcgtggctgcaccatcaagttggacttcagagagatccagcaatgtcagcaccttaccggcactctgttgggccagtttttgtctctccggcacggagagttttgcactactcgcgttttcactagaggccgctttagtaacttcagaaggcgcatcttttttcaccgctgttggcgcgttatcgttgttgtcgcaccctgccagcgccagcattagcatgcaggcggctacgcgtaactttttcatttttcatccctgccacaatggcccgttagcaacgtcgaataattattatgcgtgagaatttacgttatgtaattcagtatcacgcccatacaatccgaattttagtgagaattgtggctcagacagccaaatcagcctcttttgcttgtcgcttttcactaaacatccgacaatttagcctaaccccggcaaaaatggagatgcctatgtccacgacatggtttgtaggagccgactggctcgccgaacatattgatgacccggaaattcagattatcgatgcccgcatggcgagccctggacaggaggatcgtaacgttgctcaggagtatctgaatggacatattcccggcgcagtgttttttgatatcgaagcgctttctgatcacacttccccgcttccgcacatgctgccgcgcccggaaacgttcgccgtggcgatgcgtgaattaggcgttaaccaggataagcacctgattgtctatgacgaaggtaatcttttcagtgccccacgagcatggtggatgctgcgcacctttggtgtagagaaagtgagcattctggggggtggacttgcaggctggcagcgcgatgatctgctgttagaagaaggtgcagtagagctgccggaaggagagtttaacgccgcgtttaatcctgaagccgtggtgaaagtaaccgatgtattattggcaagccatgaaaatacggcgcaaattattgatgcccgcccggctgcacgttttaacgcagaagttgatgaacctcgcccaggtttacgtcgcggacatattcccggagcactgaatgttccgtggacggaactggtgcgcgaaggcgaactaaaaacgaccgatgaactggatgcgatattttttggtcgcggcgtcagctacgacaaaccaattatcgtcagctgcggctctggtgtaacggcagccgtggttttgttagcactcgcgacgctggatgtgccaaacgtgaaactgtacgacggcgcatggagtgaatggggcgcgcgggcagatttaccggttgagccagtgaaataagtattttacaggcaataaaaaaccgccgaatttggcggttttttattgctagtctggttcgcggcctttccagcaggttgacttgtgttacatgagcaacgcaggtgcttcacagcaaaacaatactcaccagtaactctctttttgtcaagcaaaagagagtaattattgtttatttagcgtattatcgacaccggccctttccgccgtgttcggtaataaaataacctggcttattagtccgaattcagacaaatataaataaatcctgctcaaaattaaaaattctaaccggtaaaagatattacttaaacatgtaaattcactttcctttaaaaaacaaaaaaccgccaaaatcaggcggttttttgttgctggtccggttcgcggcctttccagcaggttgtattaccgtagtaatgcaagcgcgtctcagcggagacaatactcgccagtaactctctttttgtcaagcaaaagagagttattattgttctgttagtgtattatccactgcggccctttccgccgtctcgcaaacgggcgctggctttaggaaaggatgttccgtggccgtaaatgcaggtgtttcacagcgcttgctatcgcggcaatatcgccagtggtgctgtcgtgatgcggtcttcgcatggaccgcacaatgaagatacggtgcttttgtatcgtacttattgtttctggtgcgctgttaaccgaggtaaataataaccggagtctctccggcgacaatttactggtggttaacaaccttcagagcagcaagtaagcccgaatgccgccctttgggcggcatattttagattatccgattctgtttaaagtcacgcaaaaaaccaccccagcgacgttcatagaatggcgcaatatgttcggtaataaagtggctaattcctttttccccttttttcacctgacaaatatcgattggttcatcgccaggtaatgtatcggtcgctacacttcccgtcgcctgaataatttcttcgatatcaccatcggcttcaatgccaataagtaaattaggctgtgcctcttcgttctctttaatactacaaataaaagcacgcttcaccggcttaatggttttaaataaggtggtgagactatcaatcatttgtgctggcggctctgcgacttcgcttaatatcaggctttcaccgccttccaggatttcctggctgctcagcggatttccctcttcaccaatcaacaaactgatttcacgcggcataaattctttaccggttggcagtttggcattaaggaagagcgtttcgccaagtgtcatctcaaacagcgtgcgaacgggcattacgacaaatgcctgttcgtcttcaaccgcctgttgaagtgcttctaagctggtgaaaaaaggaatgacgctggtgccgtcttctttttcccagtgctgtaaatcaagcgcgctatcttcaaccacagcctcgccctgcgccgccgtaccaggcacccagacggtggattccagtagagtacggaaaaaggccgggcggtgcgccggttcagttgctgctttttccagcaggtcttcaagttcgttttttgtttcggacataagaaccacaattcattcaacgttcggggcgcaaatgcctgatgcgctacgcttatcaggcctacaagggattcgcaatttgttgaatttgcagaatttgtaggccggataaggcgtttacgccgcatccggcatattagtttacgccgttaacagattagctatcgtgcgcacaccaagtcccgtagcgcccgcagaccactgttcaaccggcgctttacggtaagtcgcgctgcagtcgatatgcagccagccttgctgatagttctcaacaaagtggctcaggaagcccgccgccgtgctcgcgcctgccggatacgccgcgcttccggtattgttcagttcggcaaagttagacggcagctggctgcggtggaactccgccagcggcagacgccagaacggttcgttctcctgcgcggcactcgccagcaagcgaccggccagcgcatcgtcaaaactgaacagcgcgtgataatcattacccagcgcagttttcgccgccccggtgagggtcgccgcatcaatgatcatttccggtttctgcgcactggcatcaatcagaccatcggcaagcaccagacgcccttcggcatcagtgttcatcacttcaacttttttaccgttgcgataggtgatgatatcgcccagcttgaacgcattgccgctaatcaggttatccgcacagcagaggaacagcttcacgcgcttgttcagtccgcgcgtaatggcaaatgccagcgccccggtaaccgttgccgcgccgcccatgtcgctcttcatgctgtccataaacgcagtctgtttgatgctgtagccgccggagtcaaaagtgatacctttacctaccaggcacgcgtacactggcgcttctttatcgccagttgggttgtaatccagcgccagcaataccggagaacgttcactaccgcgtccgactgtgtgcagccccatataaccttgctcacgcagatcttcgcctttggtgatccgataagtcacacgatcgcccgcgacgttgctgatcagatcaacagcacgctgtgccagttggcttggtcccaattcttctgccggtgcgttgatggtgtcacgcacccagtcgatgatcatcaggcggttatccagttcctggcgctgggcatcgtccagatccggccacaccactttacgcgtgcctttcggggctttgtaaccttgccagaatgcccagcagcgatccgcatcccagccttcaccgcttaactgaacatgcttgatgcccagaccgtcaatcttgcgcgccgcacgctggatcagccccagatcgtctgccccgttcaaatgcagggtaatgccgtcattattaatgctgtaagttgctttttctccccagcgcgcgtcggcaggttgggtagagagggtaatcttcatcgcttctgtcattttagttatccttctttgtaaaagggccgccagttggcagccccaggatttttccgctaaatgattcgcgttgcaggaaggcggcaagtgagtgaagccccaggagcatagataactatgtgactggggtgaacgagcgcagccaacgcatctgcggcgtgaagcatgacgcggaaattattcggcctcgtccagccagactaacaaaatcgcttcgaggattttctcgttggatgcctgcgggtcgtcgtcgaaatcttccagatcgcaaatccactgatgcatatcggtgaatcgaaccgttttcggatcaagatcgggatacgcatcgtacagtgcttcgccaatttcgcggctatcggtccacttaagtcccatactaacctctgttaatgctcacgcgcatggttgatagtgtaacgcgggatttcgactactaaatcttcgtcggtaacgcgcgcctggcagcttaaacggctttccggctccagtccccaggctttgtccagcatgtcgtcttcctgctcactgctttccggcagactgtcaaaaccttcacgaacgatgcagtggcaggtggtgcaagcacaggatttttcacaggcgtgttcaatctcgataccgttacgcagagctgcgtcgagaatggtttcaccgctattagcttccagaacagcgccatcagggcagagatcctgatgaggcaaaataacaatctttggcatattaaacctcgtccacggaatggcctttcagcgcacgacgaacgctctggtccatgcggcgagcggcgaaatcctgggtttgtttgtctacgtttttaatcgcttgttcgatggcgtcaacatcatcgccctgcgccacttcactcaggtgagcggcagcatcgtcaatgacctgacgttctgcggcgcttaacagcgcggcatcagcagccagcgcgccgtgcagactttccagcacacgcgccgcttctactttttgttctgccagcattcgggcttttacgtcctgctcggcatagctcatactgtctttgatcatgctagcgatttcgctatcggtcagaccgtaagacggtttgacctgaatagacgcctcaacgccggtggatttctccatcgccgtcacgctcaaaagaccgtcggcatcgacctggaacgtcacgcgaatatgcgcaccgccagccggtagcgccggaataccacgcagcgcaaaacgcgccagactgcggcagtcctgcaccagttcgcgctcaccctgcattacatggatagacatcgccgtctgaccatctttaaaggtggtgaaatcctgagcgcgggccaccggaatagtggtattacgcggaatcactttctccaccaggccgcccatcgtttcgaggcccaggctcagtgggatcacatcaagcaacagcatttcgctgtctggcttgttacccaccagaatatccgcctgaatcgccgcgccaatagcgacgactttatccgggtcgatggaagtcagcggtggacgaccgaaaaattcgcctacccgttcacgcaccagcggcacgcgagtagaaccgcccaccatcaccacttccagcacttcatcagcttctacacccgcgtctttcagcgcgcgacgacaagccagtaaggttcgttttaccagtggcgcgatcagttcattgaattgttcacggctgatttcgccctgccagcccgcaacgttaacggtcacggagtccgcatcgctcagcgcgattttggctgcaatggcggcatccagcagttcacgctgaacgcggttatcgctacgatcaggaatgcccgcctgctcgcgaatgtaatccgccagcagatggtcgaaatcatcgccgccgagcgcggaatcaccgccggttgccagcacttcaaacacgccgcgacttaagcgcagaatggaaatatcaaacgtcccgccaccgaggtcataaacggcgatcacgccttcctgaccggaatccagcccgtaggcgatagccgcagcggtcggttcgttaagtaagcgcaggacgtgaaggcccgccagacgcgccgcgtctttggtgccctgacgctgggcatcgtcaaagtacgccggaacggtgataactacaccatccagctcgcctgccagggcttcagttgcccgcgccgccagtgctttgaggatgtccgcagaaacgcgcaccgggttcagcagccccgccgccgtttcaatcatcggcaggccgttttcgctggcctggaattgataaggcagatgcggatagcgttgctggatatcagccaggctgcgtcccatcaggcgtttaacagaactaattgtgttggcggtatcgagcgctgcattagtacgcgcgtcataacccacgctatgcccttgctgttgatagtgaacaacagatggcagcaggtgacggccttcatgatcggctaacgtttcggcctgaccgctgcgcactgtcgccaccaggctgttggttgtgcccaggtcaataccggccgccagacgacgctgatgcggcgcagcactcaaaccaggttcactaatttgtaataaggccatgtttagcttccagaaattaaaaatcgagcagtttttcttcgagttgttcggcactgcttcgcagtttatcgagaaaacgcagcttacgcacggtatccgccgccgcgtcccacgtctcgttgtctaactgttcaaccatcaactgatggcgggtatcaaacatctttttcacacgtttgataaagctttccagccgcgcttcatctttcgcctgttcgatctcgtccagctcttcgcgcagctccaactgttccatcaggaacgcggtgtcgcgcacagtatgctgctcgctggcgagatcaaagccgtgcaaagaaagcaaatattccgcgcgcattaacggatgacgcagcgtttgccaggcctggttaatggttgcagattgctgtacggcggcgagttgttccgcctggcttccgctggcgaatttatcaggatgatactgacgttgtagatcctgaaaacgcaggctcagcgcctgggtatcgagttgatagcgggcaggcaagccaaagagggtgaagtaatccataacattctcagggctgcgatccgccgcgataacggcgaatcaggtaaaacaaaccccacgcgcaggcgaccacggtggggttatcggtatgcgcatcaaacgtggaagctttcgccgcaaccacactcatctttgacgttcgggttggtgaatttaaacccttcgttcaggccttcttttacgaagtccagctgcgtaccgtccagaaattgcaggctcttgccatcgaccacgactttcacgcctttgtcttcaaacacgatgtcttccggcgtcggttcgtcaacaaattccagtacataagccataccactacacccggaggttctcacgcccagacgcaggccaaaccctttaccgcggttagccagaaaggtatttactcgcgctgctgcactgtcgctcagtgtaatgctcataaccaaacctcaactcttattttgcttcacgtttgcttttatagtccgcaatggcggctttgatcgcgtcttctgccagaatagaacagtgaattttcaccggcggcagttcaagttcttcagcaatatcggtgtttttgatcgcctgcgcttcgtcgagagacttccctttcacccattcggtgaccagggagctggaagcgatagcggaaccgcagccgtaagttttaaaacgcgcgtcttcaatgataccttcatcgttgactttaatctgcaacttcatcacgtcgccacaggccggtgcccccaccatgccgctgccgacgttctcgtcgttgttgtcaaaggaacccacgttacgcggattctcgtaatggtcgataactttttcgctgtaagccattataaattctcctgattccgataccgattaatgatgagcccattcgatgctgttcagatccacgccctgcttgtacatttcccacagcggagaaaggtcacgcagacgaccgatggatttacgaactaactcgatggtgtagtcgatctcttcttcagtagtaaaacgacctaaagagaaacggatagagctatgtgccagctcgtcgttcagccccagcgcgcgcagcacgtaggacggttcgaggcttgcactcgtacaggcggaaccactagaaactgcgaggtctttcagcgccataatcaggctctcaccttcaacgtagttgaagctgacgttgagaatgttcggcgcaccgtgttccaggtcaccgttcaggtaaacttcttcgatatctttgatgccgttccacagacggttacgcaggccgcgcagacgttccatctcggtcgccatctcttcttttgcgatgcgataggcctcgcccattccgacgatctggtgaacaggcagagtgccggaacgcataccgcgctcgtgaccgccgccgtgcatttgcgcttcgatgcgtacgcgcggtttacgacgtacatacagcgcaccgatacctttcgggccatagattttgtgaccggagaaagacatcaggtcaactttcaactggctcaggtcgataggcagtttacccacgctctgggttgcatcaacgtgatagataatgccacgagcacggcacatttcgccgatagccgcgatatcctgcaccacgccgatttcgttatttacgtgcatgatggacacgaggatggtgtcgtcacgcatcgctgcttcaagttctttcaggtcgataatgccgttacgctgcggtgccaggtaggtgacttcaaaaccttcgcgctccagctgacggcaggtatccagtaccgctttgtgttcggttttgctggtgatgatgtgcttgccttttttctgataaaagttggctgcacctttgatcgccaggttgtcagattcggttgcaccagaggtaaagacgatttcacgcggatcagcgccgaccagatcggcaatctgattacgggcgatatctaccgcttcttcagcctgccagccgaaacggtgagaacgggaggccgggttaccaaaggttccgtccatcgtcataaactgcatcattttctcggcaacacgcgggtccaccggcgtggttgcggagtagtcgagataaatcggtaatttcattgctctataaactccgtacatcactcaatgcaaggaatcaggctaccggctggatgtacgaccgtgtttacggagtatttagcactccggcctgattctgaattctttttattaagcgcgtaacttaacgtcgatcgcgtcttgtgtgcgggtgcgtggcgcgtcgtgagtatgctgacgaccagacacatccagcacttcctggttattaaccagttcgcctaaagtaatgttgttgagaaaaccggtgagacggtcgctcaaatcacgccacagcgcgtgggtcaggcatttatcgccgccctggcagccgcctttaccctgacaacgggtggcatctacagattcgtcaacggcgctaattacttcgccaacggcgatgctgctggcatctttgcctaacagataaccaccgcctggtccacgtacgctggaaaccagaccatttttacgcagacgggaaaacagttgttccagataagaaagggaaattccctgacgttcggaaatatcagccaacggtaccgggcccgcttcagagttgagcgcaacgtcaagcattgcggtcacggcatagcgccctttagatgtcagtctcatgtcttacttcacctcaaactcgcccctgcccggggttttttattgtaaaagtgggggtattgcatagcagggtcaagtctgacattcccgagtaaattggtcaactatttacttgactgatttagtcgggtatttaaccttcagtgccatttttttatcgtggcgtttgtacctgttgtcggatgcggcgtgaacgccatatccgccctggggttctgtacactgtaggcctgataagacgcattacgcgtcgcatcaggcaacggctgtcggatgcggcgtgaacgccttatccgacctacggttctgttcactgtaggcctgataagacgcattacgcgtcgcatcaggcaacggctgtcggatgcggcgtgaacgccttatccgacctacggttctgttcactgtaggcctgataagacgcattacgcgtcgcatcaggcaacggctgttattcggccttgttacctttattctgctgctcaatagaagccagaatcccgcgcaggatattcaactcctggctttccgggcgcgcacgggtaaacagacggcgcaatttattcatcacctgccccggatggttttcacggataaaaccggttgccagcagcgtttgttccagatgaccataaaaacgctccagatcatcgaccagcggatacggcgtctcttcatgctcgacctgctcgccgttttcctgagttgccagccaggccatgcgcacttcataggcaataacctgaaccgccatcgccaggttcaggctgctgtattccgggttagccgcaatcgcgacatgataatggcatttctgcaactcttcattggtcaagccgacgcgctcgcgaccaaacaccagcgccaccggggtatttgccgcttcagcgacgcttttcaggccgcattcgcgcgggtcgagcatcggccatggcagcgtgcgggaacgtgcgctggtgcccaccaccaggctacaaccggctaacgcttcgtcgagcgtatcgacgatgtgagcattaccaatcacatcgctggcccctgctgccagggcaatcgcctgggagtcgggtttcaccagtggattaaccagccacagattggttaatcccattgttttcatggcacgggcaacagaacccatattgccggtgtgactcgtctccaccagcacaattcgaatattttgcagcattgtctttcttcatctaaagattattcacgcatcttatcataaaacgaagacagatgccgatctcgctgctatactctgcgccgttttcccgttctttaacatccagtgagagagaccgatgcatccgatgctgaacatcgccgtgcgcgcagcgcgcaaggcgggtaatttaattgccaaaaactatgaaaccccggacgctgtagaagcgagccagaaaggcagtaacgatttcgtgaccaacgtagataaagctgccgaagcggtgattatcgacacgattcgtaaatcttacccacagcacaccatcatcaccgaagaaagcggtgaacttgaaggtactgatcaggatgttcaatgggttatcgatccactggatggcactaccaactttatcaaacgtctgccgcacttcgcggtatctatcgctgttcgtatcaaaggccgcaccgaagttgctgtggtatacgatcctatgcgtaacgaactgttcaccgccactcgcggtcagggcgcacagctgaacggctaccgactgcgcggcagcaccgctcgcgatctcgacggtactattctggcgaccggcttcccgttcaaagcaaaacagtacgccactacctacatcaacatcgtcggcaaactgttcaacgaatgtgcagacttccgtcgtaccggttctgcggcgctggatctggcttacgtcgctgcgggtcgtgttgacggtttctttgaaatcggtctgcgcccgtgggacttcgccgcaggcgagctgctggttcgtgaagcgggcggcatcgtcagcgacttcaccggtggtcataactacatgctgaccggtaacatcgttgctggtaacccgcgcgttgttaaagccatgctggcgaacatgcgtgacgagttaagcgacgctctgaagcgttaatgactcaggcgggtgatatcactcacccgccctcgcctttcaggcgctattccgaaatacttcctcactgctttactttctttcgtcactctcccaccatctttccccgattaatggatgataaagaagagccaaggaaaggttatggcactgccagtgaacaaacgcgttcccaaaattctgtttattctctttgttgttgccttctgcgtttatttagtgccgcgcgttgccatcaacttcttctattatcccgacgataaaatttacggtcccgatccctggagcgcggaatccgtcgaatttacggctaaggacggtactcgtctgcaaggctggtttatcccttctagcacgggccctgctgacaacgccatcgcaaccatcattcatgctcacggcaatgccggaaatatgtccgcccactggccgctggtcagttggttacccgagcgtaatttcaacgtttttatgtttgattatcgcgggtttggtaaaagtaaaggcacgccgtcccaggccggattgctggacgatacgcaaagtgccatcaatgtggtgcgccatcgcagtgatgtaaacccacaacgtctggtgctgttcgggcagagtattggcggggcgaatattctggatgttattggtcggggtgatcgtgaaggcatacgtgcggtgatcctcgactccacatttgcctcttatgcaaccatcgccaaccaaatgatccccggcagtggctacttacttgatgagagttacagcggcgaaaattatatcgccagcgtcagcccgatcccgcttttactcattcacggtaaagctgatcacgttatcccatggcagcacagcgaaaagttgtatagcctggcaaaagagccaaaacggttgatcctaatcccggatggcgaacacattgatgctttttccgatcgtcacggcgatgtttatcgcgaacagatggtggactttatccttagcgcgttgaatccgcagaactaacccatgatcgctagcacgataatcattcacaaaaccaccttaagacatgctaatccactggtcagaacagtttaagatgagaaaaattctgtgacgcttgccaacatttctgatgattagcattcccttcgccatttccttgagcaaactttagctattcttatcaattatgcttatgggagatctacagatgatgcctacgcttgctccaccatctgtccttagcgctccccagcgccgctgccagatcttgctgacgctctttcagccggggttgaccgccaccatggcaaccttcagcgagcttaatggtgtggatgatgatattgccagtcttgatatcagcgaaacaggacgggagatcctgcgctatcatcaactcacactgacgactggttatgacggtagctaccgggttgaaggtacagtgcttaaccaacgtttgtgtttatttcactggctacgacgtggtttccgtctgtgtccgagttttattaccagccaattcacccccgccctgaagagtgaactgaagcggcgcggaattgcgcgtaacttttacgacgataccaatctacaagcgttagtgaatctctgctcccgacggctgcaaaaacgctttgaaagccgcgatattcatttcctgtgtctgtatctgcaatattgtttgctgcagcaccacgctggaattacgcctcagtttaatccgctccaacgtcgctgggcggaatcctgccttgaatttcaggtagcgcaggaaattggacgccactggcagcgtcgggcgctccagcctgtaccacctgatgagccactgtttatggcactacttttttccatgttgcgggttcccgatccattgcgggatgcgcatcagcgggacagacaattgcgtcagtctatcaaacgtctggtaaaccattttcgtgagctgggaaatgttcgtttttatgatgaacaggggttatgtgatcagctttatacccacctcgcccaggcgttaaatcgcagtttgtttgccatcggtattgataataccctgccggaagagttcgccagactgtacccacgcctggtgcgcaccacccgcgcggcgctggccggatttgaaagtgaatacggcgtccatctttctgatgaggaaagtggtctggtcgcggtgattttcggtgcctggctaatgcaggaaaacgatctgcatgaaaaacagattattcttcttaccgggaatgatagcgagcgagaagcgcagattgagcagcagttacgcgaactaacgttactgccgctcaacattaagcatatgagcgtaaaggcatttttgcagacaggcgctccgcgtggcgcggcactgattattgcgccttataccatgccattaccgctctttagtccaccgctgatctatacggacctgacgctgacaacacatcaacaggagcagatccgcaaaatgctcgaaagtgcatgatcagcaactgggaacaactttcgggcgcaaaaacattgccggaagcgccaccagcgccattacccagaacacgccgtggcccagatattgatacaggaaaccggcgaaaacggtcatgatagcgatactgccgcccatcgcgacggcagagtaaaccgcctgtaaacggatgacttcgctaccctggcgagcagcaatataacgcatggcggccaggtggcagaccgtgaaggtgccgcaatgcagaatttgcaccactatcaaccacggcaacgccgtagttgctcccataatgccccagcgcactacgccgcaaatcgcgctgatcaacagcatatcgcgtgcactacaacggcggaaaagtttattactcagcgcaaagataatgacttccgccaccacgcccaggctccacaaataccccaccgcgctggcgctgtagccagctgcctgccagtaaatggcgctaaaaccgtaataggccgcatgtgccccctgcaataaacaaacgcaggccagaaagcgccagttctggcgaaccagcgccaaccacgcagaccaaccggtgctctcctgctggcgacttgccccttgtggctgaatcgtcggacggatgagaaagccgagcagcatggatgccacgcccaacgtcaacagcgcgaggatcacccgataatcaaacatagtgaccagtttgcccgtcagcgcgctgccaatgacaaacgccacgctgccccacagtcgcactttgccgtaatcaagcgggaactgcttttgccacgtattcgccagtgcatcggtcaacggtaccagtggactgaaaaagaggttaaagccaatcatcaccagcatcagccacgctacgtgcgcccccgcccagaaggcgacagcaaagagaagtgtcagcagtgccagcacgcgcaaggcggaaatcaggcgggaaggatcgctgacgcggggcgcgatgagcaaactcccgaggaaacgggcaaccagacctgcccccaataacaggccgatggtttctggcgttaaaccaatccctttaagccagacgctccagaaaggtagaaaaatgccgtaactaaaaaagtatgtgaaatagccgagcgccaaccagcgcgtggattgcaaaaccatgagtccctcccgtcaggaggcgttagtctggggttaatcgaatgttggtgcaagttgaaaaataagaatattcgagcctgcttcccgatgtctgtaacgccagttcacaagcactaaaaaactgagatccgcgacgcatgttgcaaaaataatgcgtaattatgccgttacgcttgccaaacgttcctgcacaatggcgatgaaatcgcgtaatgccggcttcatctcccctttcttccacgccatcagtaaagcaatggaaggcacatttccggcaatgggacgaaaaacaacctgtccggtattaaaattattcatataaccgggtatcaaagtgacgcccagccccatgcccaccagattcatggtcaccagaatattcgttgccacctggacgatatttggctggctgttttcttgcgcaaaccacgctttaacgatcggcgcaaggctaccggaatacaccggatcggtactgacgaaattcacgccatccagttgcgcggcggtgatctctttttcatgtgctaaagggtgatcaaccggtaacacaaccactaatggttcgtcaaaaagctccagataatcaatctccgggctataaacaggatggcgcattaagccgacgtcgagttcaccacggcgaattttttcctcctgttgcgtggtgattaaactcaccagctcaatcaaggtgtctggctgtctgagacgaaacatcggtaatacttttggcagtaaattcacttccgcgcttggcacaaagccaatggttaattgtctgtcttcctgaacaattttccgcgcccgtaatttggcattttccgcttgttcgaggattgccagcgcgtcctggagaaaacattctcccgccgccgtcaacgcgactttgcgcttatccctcaccagtaacggaacaccgacacagttttcaagatcgcggatctggctgcttaagctaggctgactggtatgcagtttttccgccgcacgggtaaagttcagtgcctgcgccactgcgacgaaatagcgtaaatgccgtagttccatcaccttccccttgttatcgaaaaaacgtctcagctggtagaaattaactatttcacatattagcaaccaaccagcaacatccttatggcacaaaaatagaaggtcaatacatcttatctttcaggattaaaaaatatgaccacacccagtgatttgaacatttaccaactgattgacacccaaaatggtcgggtcactccgcgtatttataccgacccggatatttaccaactggagcttgagcgtattttcggtcgttgctggctatttctcgcccacgaaagccagatcccaaaacccggtgatttctttaacacctacatgggagaagatgcggttgtcgtagtgcgtcagaaagacggcagcatcaaggcgtttctcaaccaatgccgccaccgggccatgcgtgtgagttatgcagattgcggcaacactcgcgcctttacctgcccgtatcacggctggtcttatggcattaacggcgagttgatcgatgtaccgctggaacctcgcgcctacccacaagggttgtgtaaatcccactggggactaaacgaagttccttgtgtggagagttataaagggctaatttttggcaactgggataccagcgcaccgggcctgcgtgattacctgggtgacattgcctggtatctggatggcatgctggatcgtcgcgaaggcggcaccgaaattgtcggcggcgtacaaaagtgggtgatcaactgtaactggaaattcccggcagagcagttcgccagtgaccagtatcatgctctgttcagccatgcttctgccgttcaggtattaggggcgaaagatgatggcagcgataagcgcctcggtgatggacaaaccgcccgcccggtgtgggaaaccgccaaagatgcgctgcaatttggtcaggacggtcacggtagcggtttcttctttactgaaaaaccggatgctaatgtctgggtcgatggcgcagttagtagctattaccgcgaaacctatgccgaagcagaacaacgtttaggtgaagttcgcgccctgcgcctggcgggtcataacaatattttccccacgcttagttggctaaacggcactgccacactccgcgtctggcatccgcgcggccctgatcaagttgaagtgtgggcgttctgtattactgacaaagccgcctccgatgaagttaaagccgcttttgaaaacagcgccactcgtgcttttggtcctgctggttttctcgagcaggatgacagcgagaactggtgtgaaatccagaaattgcttaaaggccaccgcgcccgcaacagcaaactgtgtctggaaatggggcttggtcaggaaaagcgccgcgacgacggcattcctggcattactaactatatctttagtgaaactgccgctcgtggaatgtaccaacgctgggccgatcttctgagtagcgaaagctggcaggaagtgctcgataaaaccgccgcttaccagcaggaggtgatgaaatgagtgcgcaagttagtctagagttacatcaccgcattagccagtttctctttcacgaagccagcttactggacgactggaaatttcgtgactggctggcgcagctcgacgaagagattcgttacaccatgcgcaccacagttaacgcgcaaacacgcgaccgccgcaaaggcgtccagccaccgacaacctggatttttaatgacaccaaagaccagctggagcggcgaatcgcccgtctggaaacgggcatggcctgggcagaagagccgccgagtcgcacccgtcacttaatcagcaactgccagataagcgaaaccgacatcccaaacgtatttgctgtgcgggtaaattatctgctttatcgggcacaaaaagagcgcgatgaaacattctatgttggaacgcgtttcgacaaagttcgccgtctggaagatgacaactggcgcttgctggaacgggatatcgtcctggatcaagcggtaatcacttcccataacctgagtgtactgttctgatgaatcgaatttatgcgtgtcccgttgcggatgtgccggagggtgaggctctccggatcgataccagccccgtcatcgccctgttcaacgttggcggcgagttttatgccattaacgatcgttgcagccatggtaatgcgagtatgagtgaagggtatctggaagatgacgccacggtggagtgcccgctacacgccgccagtttttgcctgaaaacggggaaagcgttatgcctgcccgccaccgatccgctcaccacttatccagtacacgttgaaggtggtgacattttcatcgacttaccggaggcgcagccatgagcgatctgcataacgagtccatttttattaccggcggcggaagcggattagggctggcgctggtcgagcgatttatcgaagaaggcgcgcaggttgccacgctggaactgagcgcggcaaaagtcgccagtctgcgtcagcgatttggcgaacatattctggcggtggaaggtaacgtgacctgttatgccgattatcaacgcgcggtcgatcagatcctgactcgttccggcaagctggattgttttatcggcaatgcaggcatctgggatcacaatgccagtctggttaatactcccgcagagacgctcgaaaccggcttccacgagctgtttaacgtcaatgttctcggttacctgctgggcgcaaaagcctgcgctccggcgttaatcgccagtgaaggcagcatgattttcacactgagtaatgccgcctggtatcctggcggcggtggcccgctgtacaccgccagtaaacatgccgcaaccggacttattcgccaactggcttatgaactggcaccgaaagtgcgggtgaatggcgtcggcccgtgtggtatggccagcgacctgcgcggcccacaggcgctcgggcaaagtgaaaccagcataatgcagtctctgacgccggagaaaattgccgccattttaccgctgcaatttttcccgcaaccggcggattttacggggccgtatgtgatgttgacaagccggcgcaataatcgcgcattaagcggtgtgatgatcaacgctgatgcgggtttagcgattcgcggcattcgccacgtagcggctgggctggatctttaaggaagcacgatgaaagaaaaaacgatcattattgtcggtggcgggcaagcggcggcaatggctgcggccagcctacgccagcaagggttcaccggtgagctgcatctgttttccgatgagcgacatcttccttatgaacgacctccactcagcaaatccatgttgctggaagattccccgcagttacagcaggtgttacccgctaactggtggcaggaaaacaatgttcatctgcattccggtgtaaccatcaaaacgctgggtcgcgacacacgagagttagtgttaaccaacggcgaaagctggcactgggatcagctttttatagcaaccggcgcggcagctcgaccgctgccgttgcttgatgcactgggagaacgctgctttaccctacgccatgccggtgatgccgccagactgcgagaagttctgcagcccgaacggagtgtcgtgattatcggtgccggaactattggtctggaactggctgccagcgccacgcagcgcagatgtaaggtgacagtgattgaactggcggcaaccgtcatgggccgtaatgcaccaccgcccgtgcaacgctatcttttacagcgccaccagcaggctggtgtgcgcattctgctcaataatgccattgaacatgtggtcgatggtgaaaaagtagaactgacgctgcaaagtggggaaacgcttcaggctgatgtggtgatttacggtattggtatcagcgccaacgagcaactggctcgcgaggccaaccttgatactgccaatggcattgtcattgatgaggcttgccgcacctgcgatcccgcgatctttgccggtggcgatgtggcaatcactcgtcttgataatggtgcactacaccgctgcgaaagctgggaaaacgccaataaccaggcgcaaattgccgctgccgcaatgttagggctaccgctaccgctactgccgccgccgtggttctggagcgatcagtacagtgataacttacagtttattggcgatatgcgtggcgatgactggctttgtcgtggcaacccggaaactcagaaggcgatttggtttaatctgcaaaacggcgtgcttatcggtgcggtcacgctgaatcaggggcgtgagattcgcccaattcgcaaatggatccagagcggcaaaacgtttgatgcgaaactgctgatagatgagaacatcgcgcttaaaagtctgtaaccaggataattagcgaatatctcaatgcctggggcgtggcgaggtgcaagagtgtgtattacgtttaaaagtcattatcttgcaaagggattggttatgaacacactacgttattttgattttggagctgcccgccccgttttgttattaattgcccgtatcgccgtggtcttaattttcattatttttggttttcccaaaatgatgggctttgacggtacggtccaatatatggccagcttgggcgcgccaatgccgatgctggcagcgattattgcggtagttatggaagtgcccgccgcgatattaatcgtgcttggctttttcacccgtccgctggcggtgctgtttattttctacacgctgggtacggcggtgattggtcaccattactgggatatgaccggcgatgcggttgggccaaatatgattaatttctggaagaatgtcagtatcgctggcgcgttcttgctattggcaattaccgggccgggggcaatttctctcgatcggcgttaagaaagatgccggatgcggcgtgaacgccttatccggcatttaataaattacagccactctacccgcaagctcatctcactagttgtactttcccctggtgctagcgcaatgagatcacccccttccgggcgatgatgatcatccggcgcatggctcatcggttccagacagaagaaatcaaacgcatatcctttatcaaacgcagggtcggaaacaaagatgaaataacacggtgcaggtggcgtcgtttccatgatgatggcataaccttcctgcggctgctcgatgcgggcctgaccattccatccggcaaaaccattgttcacccactggcgcggcaacggcgcgggctggttaaaatccagttcctgcggtagctgctcgcaaaactcacccgccagccactgctcccgctccagccagtaaccgctcgcctgtgcctgaatccgcgtttgcgggctcaacggaaaataaggatgccagccggtaccaaatggcagcgtctctgccccttgattggtgacagagagcgtcaccgtcagcgtatccgccgttaaatgaaacgcctgacttacccgatagtgatagacaccgctgcgatgttcatacaccagacacaaactatcatcgctgtggctgacacattgccactcgcccagccagccatcgccgtgtagatagtgcgcatcccactcaacattcggttgcagttgatactcacgcccctgccagacaaaacgattgccgctcacccggtttgcaaatggcaccagcggaaaacaactggcatcggttgccacaccgctttttttaccaggacgtaagagcggcgtcgtatcgcgccagaagccttcgattacgccgccctggtcagaaacgtccagctttaggctcccgtgggataaggtatagatggtcatccgctaactccttaatccgggaagttaatcacaactttcccgcatttgccgctcgccatcagcgcataggcatcacctgcctgttccaggctgaagcgatgggtaatggcgttacgcggccacagcttccagtccgtcagatcatgggcgcatttttccatatggaacagactggtcacccaggagccgataatccgccgttgatggtgcatcagatcggcgctgacctcgaattccacttttccggtttcaccaatgtaaaccacccgtccccagtcagcggtggattgcagtgccagcaagcgacctgcggcattaccggaacaatcgagcgcaacatccgcgccaccgtgggtgagttcggcgataatctgcggcagaccttcggtggttgctaaatagccgtgatccatcacccctaactgttttgccatcgccagacgttccggcagcatatcaacgccgatgatccgttttgcaccgcgacctttcgccagcatcatcgccatcatgccgactggccccagaccgaccaccagcacgttatcactgccggaaacttcgccgcgcaaaattccttcatacgctgtaccaacgccgcaactgataaacgcaccatcttcgtagctcagcgcatccggcaggaggatcagatctttttcttccgccagcaagtattcggcatgaccgccgtcacgctgccagccgtaagccgcttttccttcgccagtacaagaaataggaaaaccgcgacggcagttcgggcaaaaaccacagccagaaatgtgatacaccagcacgcggtcgccctctttaaaatggcggcagccttgccccatcgccacaatctgcccgcacggttcatgaccgttgataaagccctggtataacggtttatcgggtgccgccgctgtggcacggtgttgatgatagatatagtggacatcgcttccgcaaatcccggaggatttcattttgatcagtacctggttaatccccggcgtcggcaccgcaacttcccgcagatcgacggtgctatttcctggtaaataagctgccagcatcgttttcataaatccctcattaacaatacgattaattttcatccctgccgcacccgcgccaggggcgttaaggtttagcgtttcgctttactgcttcgctgggtcagcaagatattcgccagcaccgccaccacgatgatgacgccgcgtaccacctgctggaaaaaggagttaataccgagcagcaccagaccgttaccgattagcgtaatcaccagcacaccaagcaatgtaccgaacagggaaccgcgaccgccggaaagtgccgtaccgccgaccacgaccgcggcgatgacgtcaaactccagaccgtttgcggcacctgcgttaccagaaccgaggcgcgccgccaacaaaatgccggtcaccgccgctaataatccgctaagggtaaagataagaatgcgcacccgacgaacgttgatgccgcacaactgcgccgccgtagcattaccgccaacggcaaaaacgctgcgcccgaaggcggttttgcggctgatgaacacaaacagcgcaaacaacacaatcatgatcagcgcggataccggcacaccgagaaattgtccgcccagccagtccagcacctcgttttcatcaatcggcactggcagtgcgttcgtcataaacagccccattccgcgcagggcgctccacagccccagtgtggcaacgaaacttggtacattaaacacgccgcgcagcaccccggccagcgttcccatcagcgcgcctaacagcaacaccagcaggcacgccaccgccagcggaacttcaaattgcagcaaaaatgccaggcacacgctgacaaaagccaccatcggcccaacgctgacatcaatttcaccggagataataatcagcgtcatcgcccaggcggcaatcccaatggtggcggcatcgcgcagcacgttcatctggttattcaaactgataaagccaggcgcgttcagggagaagaccagataaagaatggcaatcaccaccagcaaaccgatctcattaatatggcgactgacaaattgtttgaggctgacgctcttgccctgcggcaatggtaaactgctagcagacatcttcaggttcctcggtaaaattcatcagtgcacagacagaatggcggacatcagctcatccacattgaccggagcgtgaaactcctggctgaacgtgccgtgctgtaataacaggatgcggtcacacaccagcggcaactcctccacttcactggagataaacaccacgctttttccttcggcagccagctcacggacaatacggtaaatctgctgtttggcttcgatatcgacgccgcgcgttggctcgtcgagcaacaaaatctggctggcagcatagacccaacgaccgatcaccactttttgctgattgccaccagaaagcgtgccgatgggtgtttcgctactggcggccttgaccgtcatccgctgcatcacctcttcggtcaggcggcggatggtggaccattgcagcacaccgttggcgctgattttttgccgattggtcagcactgtattttcgtcaacgcccaaccagggaatgatccccgcttctttgcggttttctggcgtatagccaatgccgcgtttcagcatgtcgccgtaatcggggcgcgtgattttctcgccgttgataacaatttcgccctgttcatactcctccagcccaacaatcgccttcagcaattcactgcgccctgcccccagcagaccagcaatgccgagcacttcgccacgacgtagcgtaaaactgatatcctccagcttgggcttatggcgtaacgcacggacttccagcacggcctgatccacaatttcctgaggggctaccggcgcaatatcaacgtgatcgcgcccgagcatcaggctcacaatatgatgcgtggaggtgttttcgagcatcacatcgcccgccacctgaccatcgcgcataacggtggcacaggaggcaatgcggcgaatttcttccatccggtggctgacataaatcaccgccacgcccagtgcgctcatctttttcaccgcgctgatcaccagttcaacttccgcactcgcaaggctactggtaggttcatcaagaatgaccacgcgcggctcgcccttcatcacccgcgcaatttccaccagctgcttttgcgccgggcttagcgtactaacaagttgttcaggactaacgtcaacgcccagcgcctgtaagcaacgttgggcatcctgcgccatttgcaggtaatcaatcatgccgttgcggcggggccactgaccgaggcagaggttttccgccactgtcagcccttccaccagacttaactcctgataaaccgcgcgcacccccagttcagcggcacggcgagtcagcgtagcttcgtcaccttccagtcgcgtctcgccaatccagatatcaccgctatccgggcgttcgctgccggtaagcattcgaatgagagtgcttttgcccgcgccgtttttacctaacagcgcacgaacttcgcctttattgagcgtgaagttaacgttatccagcgcaacgacgccgggataacgcttatttcctgccaccacttttgctaccgggactgcctctgttgccgtgaacatagggacctctgcgaatcagcgattagggcagaccatcaacgtgcgttgccagccactgtttaccgtcttccgttttggtatagagatcgataggcacctgaatcactttttcaccgtcggcttgtttattgataaccttcaatgtttgcgcgaaaacagcattgcccattttcttaccggaaatatccactaccgctttcagcacctgattgttttccagctcctgagcaatttcggttgtcatatcgctaccgaaaacagcaatttttccggcctgattttgattacgtaccgcttttaccgcgccgagtgtcgcaccgccgctttcccccataatggcgttgagatccggcgtggagataattagtttttcaccaacggaaatcgctttatctaaaacagtcccttcctgattagcgacaatttgcgcgccgggaacgcgggattttaaaacttcttcaaatcctttacgtcgctgcacacaaacttcaaaggcttcgcaattgatgacggcaattttcggctggtcaattttattggcaataaaataatcagcggcagcgttacccagttttttaccaaattccagcggatcgccgaccagatacgcgctgacatatttatcgacccccttttgattaatacaggtgttgtagcaaatcaccggaatgcccgcttcactggcgcgacgaacggtacggctactgccattttcagacactgcgcttaaaataatggcatcgacattacgcgccacgagggtatcaacaaaggtactttctttgctaatatcaccctgggcgttagtttctattaactgaacttgtacactggaatcttttgccgcatcctgaacgccctgacgcactccagcgtagtatccctgagtatcaaggtatattgcgccaatggtcatttctttttccgcagccctggcaaatagtgcgctacctaatagcgtagccattaataatagattacgggttgttctcatttttgtaggcatagagcctcctgtagggtttttattaacaacggcttattctaattattttgtgatgagcggcagcgcgtgccgctcaaatattacagttaatagggtttagtgaacgcggttaaaaataaaaggcatcacggtggtgaataatgccgctttcggccaagccggattaatcgccgtcaattcagcgcgagcagactcatattgcgcaacctccccgagtcccgcggacgccagcatcgccaccatcaggcatttttctttatgctgctgttgtaaatcgccatacaggctcaacaagtcaggttggctgacggcaaagaaatccgcttcgatactggttttcgccatctcttgcgcccactgtttcatttcactaaacagttgctgtgcggtttgttgttcgcccagcagtcgcagcgccatcccttgccagaagagataatcaaccggctgatcgttgtaataactgtgaatgttaatagtgcgatcgccggtcgccgccagacgtaaacaacgcgtcgcttcagtttcatcgccctgcgcgttggcgcatatcgcctgccagaaccagatgtcgttatcagtttgccccggtaaacggccttcgcttaaattctccggataatgcagcgcggcatgaagcagttcgcaggcctgctgcggctgtctggcatcaagatgctgccaggcgcgtaataactggttgaggataaactgactggtgaccttcccttccccgccttcccacgggtggaatttgcgcgtggcgagaatgtccgccgctttgtctgcctgacccgtgagatgccacaaattgagcagttctgcggtcatgtcgtcgcgtttcagcgcaatttccagattattttccagacgcgccagtcgtttctccggtgtggctccacttaacttatccagcaaatcccgttcgaaaagcagacgtgcatcctgcggcgcaagctgataagcattatcaagataacgcgcggccagctcataatcgtgttgcttattccacgcatggatcgctaacccgcgccagccgtcggcaaactccgggctcatctctacgcaacgttgccaaaaggcaatggctttgttgtagctacgtttgttgtagtagaagcaagctagtaaatggcgagcaaaccagcactcttcaatactctccagcgccgccacttcttccagcgtattcgggaaacggacaaactgcgggaagacatcaatggcttttgcgaccagttcgccacgttcggctttcggcagcaagctggcttgcaggtaaagcggcagcgtgcgctggcagtccagtgcgttcagcatctctgccgccagggtgggcattccccagttaatcagttgcccggcggtcatcagggcgttaacgtcgcgtccctgacacagaccgcgccactgcgcgagagcactttcgctacgaccatcgaaccagttcagccaccacagagtggcgttcagcggataatcgcgcagcagtttctcgcgctgcacacgcgcgttgtcctgacgaccacttaacaccagcagcagattatgcaggcaaagcacttcctgattggttgggcaggcgcgaagactttgttggcaaaaatccagaccagcgtcgaagttaccattacgcgccgccagtcgtgccaggccataatagccaccggctttgctgttgccgctccagaccgcacgccagaaatcctcttcggcttgttgatattgtccctgacgttcgtaagcactggcgcgaatcaaactcgcctgtccgcactgcggatttttgttcagcgcatgtgcgcgtttcagagcctgagtggcatacgccaccgcttgcgggaaatctgcgcggttatattccagcatcgccagcgccaggttacagcgataatccagcgggtccagcgccacgccgcgcaggtagtaatcgaacggactacggctggcgtgatgatattgctccagatgctgaccgataaaccaggcttcatctgtactggtaatgtcttgtgctgccagtggcgctttggcgacgtccggtaacggcaacgcttgcggctgatgttcctgataactcagtacaatattgccgtcggcatcggagagctcaatggtcagcctttcaggattgataccgtgcaacacgccctggatggcggtcgcaggcatcagtgccacggcatcatcaagtaacgcgttgcatttaccgatttcgcggatcgccaggcggtatccgttcaacggagagatggcatacagcccccactcaatcccccgcttactacgctggagttttatcaccgcatcgcgggaggcattttgcaccatgcccaaagaatgataaggcaggaaatactgctcaaaacgcttctcttcgtaagcatcaagccaggtaaaatcgggctggttatcggcaaaaataccggtcatcagttcgatatacgggccgttattgtcggtcagactcttatcccacgcctggccaaattcactgtgtccccaactccactgttttttacctggcgcaatatggtggttggcaacgtgcagcaaaccgccatcttcatcgtgacaccacgcgccgacaaaatcgtactggcttttttcggccatataactggttggaacaggcacatttttatagcgagaaatgtccactccagcggagtagtccactttgtagtaagtgccggtagcgatggggaaagcggagacggcccgtttgccgtgatcaaacaccgccgttacatccggcgggaagacgctctgatgcccttccccccctttcactgccgggttggcccaccacaagaaatgacgcggcgtggcgttcccgttatagacgcggctggcgatttccagcgccgcccggtcagggcgcagggtgaaacctgtcatcacctgtaaaccatgcatcggctccgtttcgcctacccacaccgtctgtgcaccgtcttcatgggcttcgagggtgaaatcaacgggcataaaggtggtcgggcgatgatgttgcggccagttaaactcaatcccaccggaaatccacggccccagcagccccaccagcgcaggtttaatgacttcattgtgataaacaaaatcgcgctgtttcactttatcccacgcgcgatgcacccgaccgcccagttccggcaggatcatcactttgatgtagtcgttttccagccacaccgcctgccaggatttcagggttttctgctcgctcagcgtatcggtcacgccgtagggataaaccgcgccggagcttccctgataaacgcgattttccaggaacatgggatgtatatcctgcggcccggtttcataggtcgggatctcaacgcgctcttgccacacttttactggagtcatggtgccctcaatattaacaagacatactgaattaaaagatttgtggcagtgtattgaacaatctggcaatgttttcgcggaataatcacgcaattaactaaacaaggtttagtgaagatgagagcctgcattaataatcaacagattcgccaccataacaaatgcgtgattctggaactgctgtaccggcaaaagcgcgccaataaaagtacgctggcccggctggcgcaaattagcattccggcagtcagtaatattttgcaggaactggaaagcgaaaaacgggtggtgaatattgacgatgaaagccagacgcgcgggcatagtagcggtacatggctgattgcgccggaaggtgactggacgctgtgcctgaacgtgacgcccaccagtattgagtgtcaggttgctaatgcttgtttaagtccgaaaggtgaatttgagtatttacagattgatgcaccgacgccgcaggcgctgctgtccgaaatcgaaaaatgctggcatcgccaccgtaaattgtggccggaccataccatcaacctggcgttggcaatccacggtcaggttgatcctgtgaccggcgtgagccaaaccatgccgcaagcgccgtggacaacgccggtggaggtgaaatatctgctggaagagaagctcggcattcgggtgatggtcgataatgactgcgtgatgctggcgctggcggagaaatggcaaaataatagccaggaacgggatttctgcgtgatcaacgttgattacggcattggcagcagcttcgtgattaacgagcaaatttatcgcggcagtttgtatggtagcggacagattggtcacaccatcgttaatccggatggcgtcgtctgcgactgtggacgttatggctgcctggaaactgtcgccagcttaagcgcattaaaaaaacaggcgcgggtatggctaaaaagtcaaccggttagtactcaacttgatcctgaaaaactgactacagcgcagttaatcgctgcctggcaaagtggagaaccgtggatcaccagctgggttgatcgctctgccaatgccattggtttgagtctgtataacttcctcaacatcctcaatattaatcagatttggttgtacggtcgcagttgtgcctttggtgagaactggcttaatactattattcgccagacaggatttaacccgttcgaccgcgacgaaggaccgagcgtgaaagcgacgcaaattggctttgggcaattaagccgcgcacaacaggtgctgggaattggctatttgtatgttgaggcgcagttacgacagatttgatggcgcgataacgtagaaaggcttcccgaaggaagccttgatgatcataaacgaaaaattgcctgatgcgctacgcttatcaggcctacacggagattgcaatatattgaatttgcaaagttttgtaggccggataaggcgttcacgccgcatccggcatgaacaacgagcacattgacagcaaatcaccgtttcgcttatgcgtaaaccgggtaacgtgcgcagatgtcgagaactttacctttgatgcgctcgataacggcttcatcattgatgctgtccagcacgtcacacatccagccagccagttctttcgcttcggcttctttaaagccgcgacgggtaatcgccggagtacctacacgaataccggaggtcacaaacgggctcttcggatcgttcggtacgctgtttttgttgacggtgatgttagcacggcccagagcggcgtctgcttctttaccggtcaggtttttatcaaccagatcaaccaggaacaggtggttatcagtgccgccggaaaccactttgtagccgcgctcgaggaacacttctaccatcgctttagcgtttttagcgacctgctgctggtaagttttgaactcaggctccatcgcttctttcagagcaaccgctttaccggcgattacgtgcatcaacggaccgccctgaccaccagggaaaacggcagagttcagttttttgtacagctcttcgctaccacctttcgccaggatcaggccgccgcgcggacccgccagggttttgtgagtggtggtagtaacaacgtgagcatgaggaaccgggttcgggtagacgccagcagcaaccaggcccgcaacgtgcgccatatcaacgaacaggtaagcaccgatgctgtcagcgatttcacgcattttcgcccagtccaccacgccggaatatgcagagaaaccaccgataatcattttcggcttgtgttctttggcttgtttttccagatcggcgtagtcgatatgaccggtagcatcgataccgtaaggaacgatgttgtacagtttaccggagaagttaaccggagaaccgtgagtcaggtgaccgccatgcgccaggttcatacccagaacggtatcacctggttccagcagcgcggtgtagaccgcaaagttagcctgggagccggagtgcggctggacgttagcgtagtcagcgccgaacagttctttcgcacgatcgatcgccagttgttcaacgatatcaacatactcgcaaccgccgtagtagcgtttgcccggataaccttcagcatatttgttggtcagctgagaaccctgcgcctgcattacgcgcgggctggtgtagttttcggaggcgatcagttcgatgtgctcttcctgacgtactttttcctgctccatagcctgccacagttcggcatcataatcggcaatgttcatttcacgctttaacatccgcatctcctgactcagctaacaataaaatttttggcctttataggcggtcctgttggacaacggcgaacagtataaccgaatcattgtgcgataacaggtcttgacaaaggaatttacgcaaacgattaccttcaggctacgcaaggctttggagaataaagagcttgcaaccggaaacggatttcttttcaggtttgtgatgcaaatttttcacttcatcacattctttctgaaaaacaccaaagaaccatttacattgcagggctattttttataagatgcatttgagatacatcaattaagatgcaaaaaaaggaagaccatatgcttgacgctcaaaccatcgctacagtaaaagccaccatccctttactggtggaaacggggccaaagttaaccgcccatttctacgaccgtatgtttactcataacccagaactcaaagaaatttttaacatgagtaaccagcgtaatggcgatcaacgtgaagccctgtttaacgctattgccgcctacgccagtaatattgaaaacctgcctgcgctgctgccagcggtagaaaaaatcgcgcagaagcacaccagcttccagatcaaaccggaacagtacaacatcgtcggtgaacacctgttggcaacgctggacgaaatgttcagcccggggcaggaagtgctggacgcgtggggtaaagcctatggtgtactggctaatgtatttatcaatcgcgaggcggaaatctataacgaaaacgccagcaaagccggtggttgggaaggtactcgcgatttccgcattgtggctaaaacaccgcgcagcgcgcttatcaccagcttcgaactggagccggtcgacggtggcgcagtggcagaataccgtccggggcaatatctcggcgtctggctgaagccggaaggtttcccacatcaggaaattcgtcagtactctttgactcgcaaaccggatggcaaaggctatcgtattgcggtgaaacgcgaagagggtgggcaggtatccaactggttgcacaatcacgccaatgttggcgatgtcgtgaaactggtcgctccggcaggtgatttctttatggctgtcgcagatgacacaccagtgacgttaatctctgccggtgttggtcaaacgccaatgctggcaatgctcgacacgctggcaaaagcaggccacacagcacaagtgaactggttccatgcggcagaaaatggcgatgttcacgcctttgccgatgaagttaaggaactggggcagagtctgccgcgctttaccgcgcacacctggtatcgtcagccgagcgaagccgatcgcgctaaaggtcagtttgatagcgaaggtctgatggatttgagcaaactggaaggtgcgttcagcgatccgacaatgcagttctatctctgcggcccggttggcttcatgcagtttaccgcgaaacagttagtggatctgggcgtgaagcaggaaaacattcattacgaatgctttggcccgcataaggtgctgtaatttgatgttgccggatggaaacatccggcaacccttgacgcggtttaaattgccgcgtcgtcctcttcaccggtacggatgcgaatgacccgtgccacgtcaaagacgaagattttaccgtcaccgattttgccggtttgcgccgtgcgaataatggtatcgacacaggtatcgacaatgtcgtccggtacgacaatctcaattttcactttcggcagaaaatccaccatatactccgcgccgcggtacagctcggtatggcctttctggcgaccaaagcctttcacttcggtcaccgtcatgccggtaataccgacttcggccagtgcttcgcggacatcgtccagcttgaagggttttataatcgcatcaatctttttcatgctattccttgaaaaggtcgcctgtcttttgatctgctaaacgtaacacataacgccaattcattccttgaaatcgtttgcatccagctcgtgtcgggaaagcagtttataaaattctgtccggttgcgccccgccattctcgccgcgtgggtgacgttgcctttggtgatttgcagcagcttacgcaaatagttgagttcaaactgattacgtgcctcaacaaaggttggcagcgccgtattttcaccctccagcgcctgctccaccagcgcatcactaatcaccggagaactggtcagcgccacgcactgttcaatcacgttgaccaactggcgcacattacccggccagctcgcggtcatcaggcgtttcatcgcatcggtagagaacgcgcggacaaacggtttatgtcgctctgccgcctggcgcaacaggtgatttgccagtagcggaatgtcttctgtgcgctccgccagtgccggaattttcaggctgacaacgttgaggcggtaatagagatcttcgcggaattccccgcgcgccatcgcttttggcagatcacggtgagtggcagaaataatccgcacattgatatcaatatcgcggttactgcccagcgggcgcactttacgctcctgcaacacgcgcagcagtttgacctgtaacggcgcaggcatatcgccaatttcatcgagaaatagcgttccgccttccgccgcctggaataaaccttcgcgattgctgacagcgccagtaaacgcgccacgcgcatgaccaaacagctcgctctccagcaattgctcgggcaatgcgccacagttaatagcaataaatggtttgctgttgcgcgggctggcgttgtggatagcctgggcgaaaatctctttcccggtgccgctctgaccgttaatcaaaacgctgacgtcactttgcgccaccagccgcgcctgttccagcaaacgcagcatcagcgggctgcgggtgacaattgcctcgcgccagcgttcatcggtggctggcgcggattgctccagcgcatcgtcaattgcctgatatagcgcgtctttgtcgacaggcttggtgaggaaactaaaaacgccctgctgtgttgcagcaacggcatcgggaatagaaccatgcgcggtaagaataattaccggcattcccggctgcactttctggatttcagcaaacagctgcataccgtccatttcatccatccgcaggtcgctgatgactaaatctactttttcgcgattcagtacccgtaatccttcagcgccactttccgccgtgaccacactgtagccttcgctggtcaggcgcaggccaagcagtttcagcaatcccggatcgtcatcgaccaataataaatgcgcaggtttatggctcatcaggagtgacctcatgggtggatggcgcgggcttttcactctcgtgcggcgtatccgggctgaaatttccagccggtttgcgggtgctgagctggcgttcaatatcggtcaggttttccagcttgcgggtggtgagttccagttgctgctgtagaacgtgatgttgctggcgcaatgtatccagctcgctgtcgctggactgctggagtttactgtaacgttggcgctcttccgccagttgcagttgcagcgcctgaccatcgcgccagagttgatacagtgggcgaacctgtgccgggatctcggtacttaacgcttcaatacgcgcgaccagctggcggcgctcatacggcgtaattttggcgtcggcgagcaaaatcccttgtttaaaggtattttgccagctgccgtcgtcatattggcgagcttgctgacggctctgcgcaggcattaaacgatcagcacaatccatcgcccgcagccagtaaagcggattggtttcggtacttttaccttgcagcgcccagatgtcgctacattcagtagaaagatagtcagccagttgataaaccggaattttttcttctgctggcgtatcaatggctggcttattgtgattctgcacgcaacccagcaatgccagacatggcagccctgccagccacagccgtcggggcaataatcgttgaaaaatgtgtcgcatattcaccagacttaaagcctatcccagtgggcgtaattgttgcagacagtctggacatggacagcgcggagaaaccggagcgtacatatcgtacgtgaagatttcgagcactgcccggggccgaactgacaaataaaatagcctgataggataggctgttagcattatttcgtgtttttgctgctcggtaattcaatgcggaaacaaacgtcttgcccgctctcgtcgaccagatacagttccccttgcatacggcgaatacaatccctggcaatgcttaatcccagaccgctgcccttcaccgccccttttcgctggtggcttccctgaaaaaagggttcgaagatcatggcgcgttcctcttgcggaatgggcgtgcctgtattgatgacatcaatataaacccgcgcaccatgtaaactgctgcgaaggcaaatgttaccggattcagccccgtagtgcaccgcattggagtaaagattatccagtacgctcatcagcagcattggctccgccaggcaagctgttgctttgagatcgacgtcggtatgcatcattttagcccgtgcgggcaggctatgagcagaaaccactgtctccaccagcggtgctaactcaacattctccagttccaccgcactgtccgcctgtttacggttgtaatcaagcagttgttcgatcagtttttgcaaattgcggctgctgctatcaagaatgctcaccacctctttttgctctggcgtaagcggcccgacaacctggtcagccagtaattcagtgccctcgcgcatactcgccagtggcgtttttaattcatgagataaatgtcttaaaaattgatggcgttgggattccagccaactcaggcgctcacttaaccaaagaatacgttgcccaacgctgcgtaactcgctcggtccactgaagctgacgctattgcccagagaacgcccttcccccagacggttgatcatgcgctcgatatttttcaccggcccgataatcatccgcgtgaaaagcagtaccattaccagactcaccagaaatagcaccaggctttgccaaccaaaatattgcccacgttcggcgatttcacgctgaagctgctgcccacgagagaacaccactgtgcgcgtggcctgtaccatttcggtattggcactggcaaaggcttcaagacgtgcggcggcggcagcatcgggaccgctgttgttacactgaagttgagccagattgtgcaaatcctgacgtaatgcctggtagagtttatcgtccggcagcacgcctgcgtgggcatcgagcatttcgctgtaacgcttgcgctggctttgataaaccttcgccagggttgggtcgtccagcacgcaatactgacggtaactacgctccatctccagcgccgcgttggtcatcgcttcactgcgccgggcatcaataagcgtagtgcggttaaccagcgccgcctgatcgctaagcgcattcaggctttgccaggcttgccatgccagcaccaacaggggcagcagaatcagcaaaaatgccagcattaccagttgtcgtaaactgcggggaaaaacgggccagcgtttcaaggtgttactctcgtcagacgcgaatagcctgatgctaaccgaggggaagttcagatacaacaaagccgggaattacccggctttgttatggaataaggcggtgcctaactcgacgtttcgcccgatggttgatatagctacgctgatatcagaagttggacggcaggcaccttgttgtgcgtcattcgtattttatgtagcacgtcccgaaggggctgacataagtcggtgaatgagccactggttactattatgcagtaactgtgccaataaagaaaatagtttggtaacgtactgattatacgttgctttgaggggtttatgtctcctccgctgtttgaatgtaaatcagccactgtgtcgctaaaaagagacaacttaagataaacttattagataatattaaaatcaatgagttaagtgtcgccagaaagcgacacggcaaaccacccattgtcgtgatttacagacacaaaaaagctcccggagttgggagcttatgatagtggttggtgcttaatgccgcatccgggctgcaaaaccaatgggctgacgacttaccccaactgcttacgcgcattgcggaaaatgcgcatccatgggccatcctcgccccagttttccggatgccaggagttgctgacagtacggaaaacacgttccgggtgcggcatcataatggtgactcgaccactttcagtcgtgactgccgtaataccgttcggactaccgttcgggttagccgggtaggtttcagtgactttgccgaagttatcgacatagcgcagtgccaccagccctttgctttccagtgccgccagatgcgccgcatcacgcacttccacgcgcccttcaccatgagagacagcaatcggcatttggctgcccaccatcccctgcaacagcagagacgggctttgggttacttcaaccaggctgaaacgcgcttcaaagcgatcggaggtattgcgcacaaaacgtggccacaactcactacctgggatcagttcacgcagattagacatcatctggcaaccgttacatacccccagcgccagcgtttgcggacggtggaagaaggttgcaaactcatcgcgtacacggtcattgaacaggatactcttcgcccaaccttcaccggcacccagcacatcaccgtaggagaaaccaccgcacgcgaccagggcgtggaaatcttccaggcccgtgcgtccggtcagcaggtcactcatatgcacgtcgatagcatcaaagcctgcacggtggaaagctgccgccatttcaacatggctgttcacgccctgctcacgcagtacggcaactttcggacgtgcgccagtggcaatatacggtgctgccacatcttcgttgatatcgaagctcagttttacattcaggcccggatcggcgtcgttagatttcgcctgatgctcctgatcggcacactccgggttgtcacgcaggcgctgcatctgccaggtagtttctgcccaccagacacgcaacgtggtgcggctttcgctgaatacagtctgcccgttggcggtaatcacaaaacggtcaccggaaaccgcctgccctacataatggacacaatcagcaagcccatgctgtgccagtacggactcgaccgcttcacggtcagcggcacgaacctgaatcaccgcacccagttcttcgttaaacaacgccgccaggcgatcgtcacccagagtggcgatatccgcgtcaatgccacaatgaccagcaaaggccatttccgccagcgttaccagcaggccgccatcagagcggtcgtgatacgccagcagcttacgctgtgcaaccagcgcctgaatcgcgtcatagaagcctttcagttgcgcgacatcgcgtacatctgccggtttgtcgccaagctgacgataaacctgcgccagcgccgttgcgcccagcgcgttattgcctttgcccaaatcaatcagcagcagtgcgttatcttcggtagaaagctgcggcgtgatggtgtgacgtacatcttccacgcgggcaaatgcagaaatcaccaggctcagcgggctcgtcatttcgcgctcttcgttaccttcctgccagcgggttttcatgctcatggagtctttacccaccgggatcgtcaggcccagcgccggacaaagctcttcgcccacggctttaacggcttcatacaggcccgcatcttcaccagggtggcctgccgccgccatccagttggcggaaagtttgatgcgtttgatatcgccaatttgtgttgcggcgatgttggttaacgcttcaccgaccgccagacgggcagaggcggcgaaatccagcagcgcaaccggcgcacgctcgccaatcgccatcgcttcaccgtagtagctgtcgaggctggcggtagtgaccgcgcagttagcgaccggcacctgccacggccccaccatctgatcgcgcgctaccatgccggttacgctgcggtcgccaatggtcaccaggaaggttttttccgccacagtcggcagatgcagcacacgtttcaccgcgtctgcaatggtgatcccttcacgggccagcgcgtcgcctttcgctttcagcgtttgtacatcgcgggtcatcttcggcgttttaccaagcaggacgtccagcggcagatcgatcggctgattatcaaaatgacgatcgtgcagagaaagatgcagttcttcggtcgcttcaccaatcaccgcgtagggtgcgcgctcacgcttacacagttcgtcaaacagcggtaattgatcggcagcaaccgccagcacgtagcgttcctgggattcgttacaccagatttccagcgggctcatgcccggttcgtcgcttagaatctcgcgcagttcaaatttaccgccgcgcccgccgtcgctcaccagttccggcatggcgttagaaagaccgccagcgccaacgtcgtggataaacaggattgggttggcatcaccaagctgccagcaacggtcgatcacttcctggcagcgacgctccatctccgggttgtcgcgctgtacggaagcaaagtcgaggtcggcatcagactgaccagacgccatagaagacgctgcaccaccgccaagaccgatgttcattgccgggccgccgagaacgaccagcttcgcaccgacgttgatctcgcctttttgtacgtgatcggcgcgaatgttgccgatcccgcccgccagcatgatcggtttgtgataaccgcgcagctcttcgccgttgtggctgttcactttttcttcataagtacggaagtagccgttcagtgccggacgaccaaattcgttgttaaacgccgcgccgcccagcgggccttcggtcatgatgtccagcgcggtgacaatgcgctcaggcttaccgaaatcttcttcccacggctgttcgaagccaggaattcgcaggttggaaacggagaaaccaaccagacccgctttcggctttgcgccgcgcccggtggcaccttcatcgcggatttcaccgccggaaccggtcgccgcgcccggccacggagaaatcgccgtcgggtggttgtgagtttcgactttcatcagaatatgcgccggttcctgatggaaatcgtagcggcccgtttcgtggtcagcaaagtagcggcccacttcagaaccttccattacggcggcgttatctttataagcagagagaacgtgatctggcgtggtttcgaaagtatttttgatcatcttgaacaggcttttcggctgctgttcaccatcgataacccagtcggcgttaaaaattttgtggcggcagtgctcggagttcgcctgggcaaacatatacagttcgatgtcgttcgggttacgaccaagctttgtgaaagcatcctgcagatagtcaatttcatcttccgccagagccaagccaagacgcaggttagcgtcgatcagcgcctgacggccctgccccagcaaatcaacgctggtaaccggagtcggttgatggtgggcaaacaactgctctgcatcatctaaagcaaaaaagaccgtttccatcatgcggtcgtgcagttcagcggtaacctgctgccattgttcattggtcagcgtaccggcttctatatagtaagcaacgccgcgctcaaggcggtttacctgttgtagcccgcagttatgggcaatatcggtcgctttgctagaccagggagagatggtgccaggacgcggggtcaccagcaggagtttgccttgcggggcgtggctggcgagtgccgggccatatttcagcaggcgttcaagttgtgcgtgctcatcatcgtttaacggcgcattgaggtcagcaaaatggacatactcggcgtaaatattgtgaaccgggagcctggcagcctgaaaacgtgccagcagtttgttgattcggaatgcgctcagtgcagggctaccacgcagaatttccatcataagtctctcgtcttctaagctttcggtgtacccaagggggggaaacgggcgtcattataaagaatctgatgcgctgacgaaaccgtttgcgtggaaataaaatcaccatcgtgaattagcaacgcgtgccgccaatggctgtaataagttgccatctggcgcaggtttacgcaaaatgccgctcatttatgagtaaacctttcactattattacgttttttcaagctgggacgcgcacgacacagagaattaactaattgaaaaaattaaagattaattatctgttcatcggcattctggcactgctgctcgcggtcgctctctggccatccattccctggtttggtaaagccgacaaccgtatcgccgccattcaagcgcggggagagttgcgtgtgagcaccattcatactcccctgacttataacgaaatcaacgggaaaccttttggcctggattacgaactggcgaaacagtttgccgattacctcggcgtaaaactgaaagtgaccgtgcggcagaatatcagccagctgtttgacgaccttgataatggtaacgccgacctgctggcggcaggacttgtctataacagtgagcgggtaaaaaattatcagcctggccctacctattattccgtgagtcaacaactggtttataaagtgggtcagtatcgcccacgtacgctgggcaacctgacggcggagcaactcaccgttgcaccgggtcatgtggtggttaacgatctccagaccctgaaagaaacaaaattcccggaattaagctggaaggtagacgacaaaaaaggctctgcggaattaatggaagatgtcatcgaaggaaaactcgattacaccattgctgattctgtcgccatcagcctgtttcagcgcgttcacccggagctcgccgtagcgctcgatatcaccgatgaacaaccggtgacttggtttagcccgttagatggcgataataccctttccgccgccctgctcgacttcttcaacgaaatgaatgaagacggtacgctggcacgcattgaagagaaatacctggggcatggcgatgattttgattacgtcgatacgcgcacatttttacgcgccgtcgatgcggtactgccgcagttaaagcccctgtttgagaaatacgccgaagaaattgactggcgtttgctggccgctattgcttatcaggaaagccactgggatgcacaggccactagtccgacgggtgtgcgcggcatgatgatgttaaccaaaaataccgcgcaaagcctcggcattacggatcgtaccgatgccgaacagagcatcagcggtggcgtgcgttatttgcaggatatgatgagtaaagtgccggaaagtgtgccggagaacgagcggatctggtttgccctcgctgcgtacaatatgggctatgcgcatatgctggatgcccgcgccctgacggcaaaaaccaaagggaatcctgacagttgggctgacgtaaaacagcgtctgcctttacttagccagaaaccctattacagcaagctgacttacggctacgctcgtggacatgaagcctacgcttatgtcgaaaatattcgtaagtatcagattagcctggtgggttatctgcaagagaaagagaagcaggctacagaagcggcgatgcaactggcgcaggattatccggcggtaagccctacggagttgggcaaagagaaatttccttttctcagctttctttcccagagcagtagtaactatttgacccattctccctctctgctgttttccaggaaagggagtgaagagaaacaaaattaatccgtgctggattgcgcttttttctgcgctttaatttcctggcggcgcatgcgaaagaagtcactgagcaacgccgcgcactcatccgccagtattccttccgtaatttccactcggtgattcatacccggatgatgcagcacatccattaaagatcccgcagcgccagttttcgcgtcacgcgcaccaaagaccacgcgaccaatgcgactgtggatcatcgctccggcacacattacacatggttcaagcgtgacatacaacgtggcgtcgatcagacgataattttgcatcaccagaccaccctgccgcagggccatgatttctgcatgtgcggtgggatcatggcgaccaatcgggcggttccagccttcgccgattacccgattgttatgcactaataccgcgccgaccggcacttcccgctcatcccaggcacgtttcgccagcgtcagcgcgtgacgcatccagtattcgtggctaaattcgacttcagacaaaaagaaaactccggttataaaagcgcggcgcattatacacggacgctatgctttactttattccagttgctggagttcaccgcgcggggttactcgccaacgatgctgacagaaataaagcagcggattgtcctgattactgtcgctatagccactgtacagccgcagcggagtgccgattttgcgctccagttgtgcgaccttttcatgtcccagacaacgcatcgtcaatacccaaccaccatagccacgctgaatttggctggcgataagattaacccgcggcagccagggcgtatcgaaataaaccgcttcaaccagcggctgcggagagccggtaatcaaccagatatcagcatcggaacttaacaggtaggtggttaatcgctcctgaaccagcggaaaggcggtaacattgtcgcgaaaccagcgcacgaaatcggcctgcaacgtctgtaaacgtgcttcgctgtgaccaaaagtgcacccccacagaagcagactcatcggccagcgtgccgcacgaccttttatcaataacgcaatggctataatcggtaacaacggcaggacaagtaacgcattcagcggttggcgacgtagtaaatagcgcagaaaactgccgaacatatcctgctgatgcaatgttccatctaagtcaaaaaacaccacacgacgctcgtgagttgccaaaccatattcctctggactgaaacatcctgattaattttcgctactacatagcctaacagatagatcatcacttttccggcaacaatcgaccgcatcatggctaactggaatttttaattcatggcaattagcggcaatggaatataaaattcactcgcgtgtgtctcatattgcctgttgtcgccactatttcatcgcgaggaaagatatgaacggcttacttcgtatccgtcagcgttaccaggggcttgcccagagtgataaaaaactggcggattatctgctgctacaacctgatacggcgcgccatttaagctctcagcaactggccaacgaagccggagtcagtcagtccagcgtcgtgaagttcgcgcaaaaactcggctataaaggttttccggcgcttaagttggcgttgagtgaagcgctggcaagccagccggaaagtccctccgtgcccattcataaccaaatccgcggtgatgatccgttacggctggtcggcgaaaaactgattaaagaaaatactgccgctatgtacgcaacgctaaacgttaatagtgaagagaaactgcatgaatgcgtaacaatgttgcgctctgcgcggcggataattctgaccggtattggcgctagcggtctggtggcgcaaaactttgcctggaagctgatgaagattggcttcaatgctgccgcagtgcgcgatatgcatgcgctactcgcaacagtacaggcgagctcccctgacgatctgttattagccatttcctacaccggtgtacgacgcgagttaaacctggcggcagatgagatgctgcgagtgggcggaaaagtgctggcgattaccggctttactccgaatgccctgcaacagcgtgcttctcattgcctgtataccattgccgaagaacaagcgacaaacagtgctagtatctctgcttgtcacgctcagggaatgttaacggatttgctgttcattgcgctgattcagcaggatctggaactggcaccagaacgtattcgtcatagtgaagcgctggtgaaaaaactggtctgagtaaagaatgcgcgtataatgcccgcccggtttgtgttgttttgagagtttccttatggcgttgttaatcactaaaaaatgcatcaattgtgatatgtgtgaacccgaatgcccgaatgaggcgattagtatgggagatcatatctacgagattaacagcgataagtgtaccgaatgcgtagggcactacgagacaccaacctgccagaaggtgtgcccgatccccaatactattgtgaaagatccggcgcatgtcgagacagaagaacagttgtgggataaatttgtgctgatgcaccacgcggataaaatttaatattctactctggaagtagagtattaattatattactgggaagccttaacgccattatatttatttaattgatgacattagcataatcattcactaagttaatttatatagtatctgcccagacacttatttatagttattaaaggtgcgtccgactggttcaccggacgcaccttaagtacgtttccttgtgttataagaacagaaggatcagctgtaaaacagcaatgatgattttgatgacccgtttaatcaggtatcggcaatcagtcattcgtttttccttaaacaaggaatgcagccattcagattagcccttacatctccccaaaactgaacgtgcgagttattgagggtgcatgctgcactccacaccagagctttgacgacaccactcgtttcaatgggggaattctgtggcatggtgtaaagcacagcaaaatcttcaataacgaagccaattttaatgtacttacgaattggcggtcacgttaatctttccatcaatattgctttcttcgtaaaggctcgagtttttatgctaaagattgcaagttgcttgtaaaagataagtacactgatccataatcgctgttgttgagggtgcatgctgcacaaaattaaagttaaaaagtaaaacccccgttccttaccagttcgggggttttactttttaaagagaacggtattatttttaactttcaataattaccgtggcacaagcatagtgccgctcatctgccagcgttacatgcatatttgcaacgcccagcttttccgccagttttaatgcctcgccccatagccgtagccgtggtttgccgagctcatcattgaatacttcaaattgattaaacgccagaccattgcggatcccggtgccaaacgcttttgctgcggcttctttcacagcaaaacgcttcgccagaaaacgcaccggctggtggtgcgttttccagatagcccattcgttatcgcttaatacgcggcgtgccaggcgatcaccggatcgggcgatcaccgcttcgatgcgagcgatctccacaatatccgtgcctaaacctaatattgccattagccacgcgcttccagcatcagacgcttcatttctgccaccgcatctttcagtccggtcatcactgcacgaccaataatggcatgaccgatattcagttcatgcatctcagggatggcggcaatggctttcacgttgtgataggtcagaccgtgtccggcgttaactttcagaccgaggcttgcggcaaaggtcgcggctttggcgatacgcgccagctcttgcgcctgttcggcgtcagttttggcatcagcatagcaaccggtgtggatctcgataaacggtgcgccaacctctgccgcagctttgatctgctcttcatcggcgtcaataaacagagaaacctgaatcccggcatctgccagacgtttgcaggcatcgcgcattttgtcacgctgccctgcgacatccaggccgccttcggttgttacttcctgacgcttttccggtaccaggcagcaaaaatgtggcttcgtctcaacggcgatcgccagcatctcttcggtcaccgccatctccagattcatgcgggtatccagcgtctgacgcaggatgcgcacgtcgcggtcagtaatgtgacggcgatcttcacgtaaatgcacggtaatgccgtccgctcccgcctgctcggcaataaacgcggcctgcaccggatccgggtaagcggtaccgcgcgcgttgcgcagcgtagcgatatggtcaatgttgacgcctaacagtaattcagccatgacaatcctcatcattcataatgtgttttcaccgttcgcttaggcataaactgccggaacagttccctgctctttaaaggtttaccgccaagatacggcttaagcgccatgcgggtaaagcgtttcgcggcgcgcagtgtgtctgcgtcaggaaattcccgtgcgtttaacgcttttaactgccttccggtgaacgttttattgtcgataacgacgcttgcgataaaccctttttcttcgcgataacgatacgtcatggtgtcatctaccggctcgccgctacccgcacaatgggtaaaattgacgccataacccagatgcccgagcagtgccagttcaaagcggcgcagcgcgggttctggcgtaccagtgacccctgcaagagactgaatgcagtgcaagtaatcgaaaaaaagttcagagaagcgcgtctcgtattccagtacgcgggagagaagttcgttgatgtacagaccgctgtaaagcgtgataccgcttaatggcagcgccaggctgacggcttcagcactgcgcagcgttttgacttcgccacgcccgccaaaacgtagcaagagaggggtgaaaggctgtaatgcacctttcagggtagagcgtttagagcgtgcgcctttggcaaccagacgcacgcgcccgctttcctccgtgaagacgtccagcatcaggctggtttcgctccacgggcgactatgcaggacaaatgcgcgctgccagccttccatcggagttactcttaaagatcgtcaacgtaaccgagactgcgcagtgcgcgttcgtcgtcggcccaaccggatttcacttttacccacagttcaaggtgaacaggcgcttcgaacatttcctgcatgtctttacgcgcttcaatcccgatggttttgatcttggcccctttgttgccaatgaccatcttcttctgcccttcacgctcaacgagaatcaaaccgttgatgtcataaccaccgcgttcgttagagacgaaacgttcgatctccacggtcacggagtacggcagttcagcgccgaggaaacgcatcagtttttcgcggatgatttcagacgccataaaacgctgactgcgatcggtgatgtaatcttccgggaagtgatgagtcgcttcaggtagatgcttacgcacgattgccgcaatagtgtcaacattcagcccggtttcggcagagattggcacgatatcgaggaagttcatctggcttgccaggaactgcaggtgcggcagcagatcggctttctcctgcacgttgtccactttgttcaccgcgaggattaccggcgctttgccttcgcgcagtttgttgagcaccatttcgtcgtccggcgtccagcgggtgccttcaacgacaaaaatcaccagctcaacatcgccaatagagctgctcgccgctttgttcatcaggcggttaatggcgcgtttttcttccatatgcaggcccggtgtatcgacgtagatcgcctgatacgcgccttcagtatggatccccacaatgcggtgacgagttgtctgcgccttgcgggaagtgatggagattttctgccccagcagtttgttcaacaatgtggatttgccaacgttcggacgtccgacgatggcaataaatccgcagtaacttttatcgatgctcattccagctccagttttttcaacgcctgttcggcggcagcctgctcagccttacgacggctactacctgtgccaaccaccggttcactcaggccgctgacctggcagtggatagtaaattcctgatcgtgcgcttcgccacgtacctggactaccagataagtcggcagcggcagatggcgaccctgcaaatattcttgcaagcgcgttttcggatctttttgtttatcgcctgggctaatttcgtccaaacgagtttgataccagttgaggattaatttctcgacggtttgaatatcactgtcgaggaatacgccaccaattaatgcttcgacggtgtcggcgagaatactctcacgacgaaatccaccgcttttaagttcacctggccctaaacgtaagcactcgcctaactcaaattcgcgcgccagttccgccagcgtattgccacggaccagcgtggcgcgcatccggctcatatcgccttcatccacacgagggaaacggtgataaagcgcattggcgataacgtagctcagaatagagtcgcctaaaaattctaaacgctcgttatgtttactgctggcactacgatgagttaatgcctgctgcaacagttcctgatgattaaaagtgtagcccagcttccgttgaagccgattaattacgatggggttcatgcgataccaataaataaatgcgtcaacaattcagcacacgaaacagacctgatatacatggttctgctaactgcttcgctgcagtttcagtttaccggtatatggggaccaacgctgtttcgtgtgccgtggcaacctggaggtgccaaccttaaacttcgggggaatattctatacacaacgacgggggatgtcgttagccacgggagatttatctcataaataattcacgttgtcgccataacggcgacaacgtgaacgaagatggctattaatggatgccgccaatgcgacttaagcgcagaccagtcggccattcgccttcttgcttatcgaagctcatccagatagccgttgcccgaccgaccagattcgcttccggcacaaagccccagtaacggctgtccgcgctgttgtcgcggttgtcgcccatcatgaagtattgtcccggaggaacaatccaggttgccagttgttgccctggctgctggtaatacatccccacctgatcctgcgcaatcggcactgtcagaatgcggtgcgtcacatcacccagtgtctctttacgctcggaaagacgaattccattttctttggtttcgtttttcggcacttcaaagaatccgctggtcgcttccccaccattacggcgactgaaggtctgaacgaaatcgctcggttccacgttactgtaggtgaccggcagcgcgttttcacacgcctggccggaactgcatcccggttgaatcgtcagctctttactgaccggatcgtaagtgactttatcgcccggtaaacccaccgcgcgcttgatgtaatcaagctttggatcttccggatatttaaagaccacgatatcgccgcgtttcggatgaccggtttcgatcagcgttttctggtagataggatctttaatgccataagcaaacttctctaccagaataaaatcaccaattaacagagtcggcatcatgctaccactcgggatctggaacggttcataaataaagctacgcacaatcaatacgatagccagtaccggaaaaacagaagcaccggtttccagccagccaggcttcggcgcaacctttttcaacgttgctttatccagactgtccccggcagccgcctgcgccgctgcctgacgttcccgccgtttaggtgcgaaaaagaatttatccacgcaccataaaatgcccgtcaccagtgtggcaatcaccagaatcagggcaaacatattcgccatgccaactcctaagggttatttgttgtctttgccgacgtgcagaatggcgaggaacgcttcctgcggcagctcgacgttaccgatctgcttcatgcgtttcttaccttctttctgcttctgcagcagctttttcttacggctgatatcgccgccataacatttagccagtacgtttttacgcagctgtttcacggtggatcgcgcaatgatgtgcgtaccaatcgctgcctgaatggcgatatcaaactgctggcgtgggatcagatctttcatcttctccaccaactcgcgaccgcggttttggctattatcacggtgggtgatcaacgccagcgcatcaacacgttcaccgttgattaatacgtctacacgtaccatgtcggacgcctggaagcgcttgaagttgtaatccagagacgcataaccacggctggtagatttcaggcgatcgaagaagtcgagcaccacttccgccatcgggatctcgtacgtcagcgccacctgattaccgtggtaaaccatattggtctgcacgccgcgtttttctacgcacaacgtaataacgttgccgagatatgcctgcggcagcagcatgtgacactctgcaatcggctcgcgcagttcgtagatgttatttaccgcaggcagcttggatgggctgtcgacgtagataacttctctactcgtggtttcaacttcatacactacggtcggcgcagtggtgatcagatccagatcgtattcacgttccagacgttcctggatgatctccatgtgcagcaggccgaggaagccgcagcggaaaccaaagcccagcgcgctggagctttccggctcatagaacagactggcatcgttcaggctgagtttacccagcgcgtcacggaaggcttcatagtcgtcggaacttaccgggaacagaccggcgtatacctgcggtttgactttcttaaagccaggcagcgccttttctgccggattacgcgccagcgttaaggtatcgccgactggagcgccgtggatatctttaatcgcacatacgagccagcctacttcgccacatttcagttcagtgcggtcaacctgtttcggcgtgaagatgcccagacggtcggcgttataggtctgcccggtactcatgactttcactttgtcgcccttacgcagggtgccgtttttaatacggataagactaacaacgcccaggtagttgtcgaaccaactgtcgataattagtgcctgcaacgggccttccggatcgccttccggcggcggaatgtcgcgcaccagacgttcgagaacgtcctgcacaccaacgccggttttcgcactacagcgcaccgcgtcggtggcgtcgatgccgacgatatcttcaatttcttccgccacgcgttcaggatcggctgccggcaggtcaatcttgttcagtaccggcacaacttcgagatccatttccatggcggtgtagcagtttgccagggtttgcgcttctacgccctgcccggcgtcgaccaccagcaatgcaccttcacaggcagccaggctacgggaaacttcataggagaagtctacgtggcccggggtgtcgataaagttaagctgataggtttcgccgtcagacgctttgtagtccagcgtcacgctttgcgctttgatggtaatgccacgctcacgctcaagatccatggaatcgagaacctgcgcctccatttcacggtcagacaggccaccgcagatctggataatacggtcagacagcgtgcttttaccgtggtcaatgtgagctatgatgctaaagttacgtatattcttcataaagtatgattattgtgccttaatgcccggttaaccaggcttttagaagtcgctgttctgagcttaacgtctgtattaatagaaacgccgcattctacactacaacattgaggcgaggaaatgttcataccgtatggattgtggtatctggaaacgtcctcgcatttgttatgcaaaatgcaacaaagccagtgaaatcactggctcgcgtcttcgctagatgtttcaaatcgcacaaggccaggcggcaatgccacgcttaagatgatcggttgccattctgcccgggcagcaaacttacggctgtagccgcgcgcaatcaggaacccgccaataccaccgaggatcgcaccacataatgctgcgacgtcagaagcaaagagtagctgaaataggctagcgataaggaataatcccaccagcgggctcatataaaccagtaatgcggagctaagcaggctgccttcggcgatccccaattccactttttgccccggcactaacggctcatcacagggtacgacaatggtatgcgtggtttgcgggccaagtttatttaacacgcggctaccgcaaccggcgcgactagcgcagctgctgcaactagctttaacatcacaactgaccagcgcctgcccgttttgccaggagacgacggtagcccactctttgatcattgcgctgccccgaacttaatattctcggcaatgcgtttcgccgtttgcggcggcagttcaccgacaatggtgatttcggcgttatcacgtacgcttgtactgacggttctgcgtccggtgcgcaacatctgatcggtgctgcttggcgtagcgcggttaacgtttacgctgaagctgaataatccgtcggaatagagacgactttcgataggcatgttgtccatcgtcggtagcggacgtcgactactggaaacttcgctaaaaccctgtggcaaccaggttggcgtccagctgaatttagctttttcacctacaggaacagaaagcaacggcggcaaatttgccttcgccagcgtctgcatactgctgctgatatcctgattgacgttaaaagcaatcacgcgaaattgttccagcgtttcaccatcgcgatcaaggagatcaacccgcatcggtaatttgctttcggtgtccatccacacgatgtagctgtagcgtgtaccatctcgggcaaccacgcgaatgacttcgcaaagacgatcagcaatacgcgtgcgcccgacggagataaagtcgtagtaaggagaaaggcgtttgaaatcggtatagataaggcttggcagagaatcaacaatgtaatcgccattaagcgtgaacggttcaagtcccggttcaaaatagctgatttcattgccgcgctgtaccacttcccggcgcgggccatccatttgcaacaattgtgcaagaggacggttatcgaggcgtgcatgtcgataacgcagagactcaacaccctgtttattgatgctgatgaaactcagctcgtaattcagactctgactggccaggttcatctgctgtaataacgccccggacgcgggagtggcgctggcgttagcagagaataacaggctacctgtcactaaactcatggcaaaccaaagttgcttcattactggctttgcgttcctaaagtttgaattcctggcacctgtacagcggcttgctgggtttgcgcctgctcaaactgaagctgttcagagtggagtcggcgttgcagttcgtaatcctgcaacattgcattaatgcgacgacgctgctcctgtacctgctgctgttgaccattgtttgcggtcgcttcagaaggtactcccaggcttaccgggctggctttacccatcatcggcagtgtattaaataccggcgtttcgggctgctgggacgtttcagattgtccattatagtgctggacgccaacgataactgcaaggcttacgcatgcggctacgcccatttgggtaagctgtgccgcccacggacgtactttctgccagaatggcattttctgccattgatgcggcgcaggctgggcttccgggatcaatgtcgccggttgacgtactggctcttcttcaatggcggccatcacgcgactagagatatcgaaatggagcacctcgggagtatcaccccgcatactgtcacggattaagtgatagctttcccaggttttctgcatttctgggttatgagccagttcgttaagcagctcactatccagcgtttcgccatccattaaagcggaaagttgttctttctgcatgcctaatacccttatccagtatcccgctatcgtcaacgcctgataagcggttgaactttgttatcaatagcttccctcgctcggaagatacgactacgcaccgtacctaccggacaatccatgatagcggctatctcttcatagctcaggccatccagctcccgcaaggttattgccatgcgtaaatcttccgggagggactcaatagttcggaaaactatctgtctcagttcttcactcaacattaagttctcagggttgctaatttctttcaacgcgccgccactttcgaagttttcagcttcaatggcatccacatcactggaaggtggacgacgcccctgagcaaccaggtaatttttcgctgtatttacagcaatccgatacagccatgtataaaaagcgctatctccccggaagctatccagcgcacgataggctttaataaaagcttcttgtaccacatcgggaacatcaccgctcggcacatagcgggaaaccagactcgccactttatgctgatagcgcactaccagtaagttaaaggctttctgatctcccttctggacccgttcaaccaggacctggtccgttaactgctcgctcatccgaggtaaagtctccccaaaccaaatttccacgcgctatcgaaacgccactccattagctgcaatttgagcaagcaaagggttagagtgtctcgtttttgtaaagttccgtaacgcatctgtttttgtttgtcatgctgtagacggatcattatctatcattataagtctacagaatctgaacatcgcattatctgtgtagaaatgcccatttaactgcctgaagagtaacccaacggcctttttatttcaccacctaatcctccaccagccagtaacttctctttttctcgccgccctgcgtcagcgtgtttagcaactgtaacaaatattaaaatagcaggtgtttatccgcacaacatgatgctatgctgaccaaaccatgtttagtaaattaaacaaagaaaatgaatactctccctgaacatagttgtgacgtgttgattatcggtagcggcgcagccggacttagtctggcgctacgcctggctgaccagcatcaggtcatcgttctaagtaaaggcccggtaacggaaggtagtacattttatgcccagggcggtattgccgccgtgtttgatgaaactgacagcattgacagccatgtggaagacacattgattgccggggctggtatttgcgatcgccatgcagttgaatttgtcgccagcaatgcacgatcctgtgtgcaatggctaatcgaccagggggtgttgtttgatacccacattcaaccgaatggcgaagaaagttaccatctgacccgtgaaggtggacatagtcaccgtcgtattcttcatgccgccgacgccaccggtagagaagtagaaaccacgctggtgagcaaggcgctgaaccatccgaatattcgcgtgctggagcgcagcaacgcggttgatctgattgtttctgacaaaattggcctgccgggcacgcgacgggttgttggcgcgtgggtatggaaccgtaataaagaaacggtggaaacctgccacgcaaaagcggtggtgctggcaaccggcggtgcgagcaaggtttatcagtacaccaccaatccggatatttcttctggcgatggcattgctatggcgtggcgcgcaggctgccgggttgccaatctcgaatttaatcagttccaccctaccgcgctatatcacccacaggcacgcaatttcctgttaacagaagcactgcgcggcgaaggcgcttatctcaagcgcccggatggtacgcgttttatgcccgattttgatgagcgcggcgaactggccccgcgcgatattgtcgcccgcgccattgaccatgaaatgaaacgcctcggcgcagattgtatgttccttgatatcagccataagcccgccgattttattcgccagcatttcccgatgatttatgaaaagctgctcgggctggggattgatctcacacaagaaccggtaccgattgtgcctgctgcacattatacctgcggtggtgtaatggttgatgatcatgggcgtacggacgtcgagggcttgtatgccattggcgaggtgagttataccggcttacacggcgctaaccgcatggccagcaatagtttgctggagtgtctggtctatggctggagcgcggcggaagatatcaccagacgtatgccttatgcccacgacatcagtacgttaccgccgtgggatgaaagccgcgttgagaaccctgacgaacgggtagtaattcagcataactggcacgagctacgtctgtttatgtgggattacgttggcattgtgcgcacaacgaagcgcctggaacgcgccctgcggcggataaccatgctccaacaagaaatagacgaatattacgcccatttccgcgtcagtaataatttgctggagctgcgtaatctggtacaggttgccgagttgattgttcgctgtgcaatgatgcgtaaagagagtcgggggttgcatttcacgctggattatccggaactgctcacccattccggtccgagcatcctttcccccggcaatcattacataaacagataaaaagcctgggtcagcgccgtatacgcttcggaatagttctggtctggcccacgaatgactaagcgatcgctaaagcattctcccgcctgcggggagaatgccagcagcacccgatgcggcagtcgcgcttcgttttccgccacatccgtccgcaaacgtaaatgccagcccatgcttaatgccagctccgtaaaaccattaccaatctgctctggcagcactacgcagaaaaatccctcttcggtaatgcactccgccgcacaggtcagcaagcttgggtgatcaagcgtagtggtatagcgagcctgttcccgttgaggtgtgctgcactctactccctgctgatagtaaggtgggttactgatgattaaatcgaagcgtactgtctgctgtgtaatccactgctgaatatccgccgtatggacgttaatccgctctgcccacggggactggttgatattttcctgcgcctgcgcggcagcttcactttccagttcaactgcatcaatcatcacgctgtcatcggttcgctgcgccagcattaatgccagcaacccgctacccgcgccgatatcaaggcaacgttttaccccagccaccggtgcccatgcgcccaataaaataccatccgttcccactttcatcgcacagcgatcgtgagcaacaaaaaactgtttaaaagtaaatccattacgacgaagcacggatgtagactgactcatgaaaataaaaccttgcaggaaaaacggcgatagcaccgggtgagaacaatacccgagaagcgatatccatacaaacagatgaagattgcagccgtaacgtctataatcagcgccccacacagaggtagaacatgactgtaacgactttttccgaacttgaactcgacgaaagcctgctggaagccctccaggataaaggtttcactcgcccgaccgccattcaggctgccgccattccgcctgcgctcgatggccgtgatgtactcggttctgcgccgacaggcaccggtaaaacggcggcgtatctgctgccagcgttgcagcacctgctcgatttcccgcgtaagaaatccggtccgccgcgtattttgatcctcaccccaactcgcgagctggcgatgcaggtgtccgatcatgcccgcgaactggcgaaacatacgcatctggatatcgccaccatcaccggcggcgtagcctatatgaaccacgcggaagtgttcagcgaaaatcaggacatcgtggtcgccacgaccggacgtctgctgcaatacataaaagaagagaacttcgattgccgcgcggttgaaacgctgatcctcgacgaagcagaccgtatgctggatatgggcttcgctcaggatatcgaacatattgctggcgaaacgcgctggcgtaaacagaccctgctctttagcgcaacgctggaaggcgatgcgattcaggactttgccgagcgtctgctggaagatccggtggaagtttctgccaatccctccacccgtgagcgcaaaaaaattcatcagtggtattaccgcgccgatgatcttgagcataaaaccgcgttgctggtgcatctgttaaaacagccggaagcgacccgcagtattgtgtttgtgcgtaagcgtgagcgtgtgcatgagctggcaaactggctgcgcgaagcgggcatcaacaactgctatctcgaaggtgagatggtacagggcaagcgtaacgaagcgatcaagcgtttgaccgaaggtcgcgtaaacgtactggtcgcaaccgatgttgccgcgcgcggtatcgacattcctgacgtcagccacgtctttaacttcgatatgccgcgcagtggcgatacttatttgcaccgtatcggacgtaccgcgcgcgccggtcgtaaaggcaccgcaattagcctggtggaagcccatgaccatctgctgctgggtaaagtaggccgctatattgaagagccaattaaagctcgcgttattgatgagttacgcccgaaaacgcgtgcgccaagcgaaaagcagaccggcaagccaagcaagaaagtactggctaaacgtgctgagaagaaaaaagctaaagagaaagagaagccgcgggtgaaaaaacgccatcgcgacaccaaaaatattggtaagcgccgtaaaccaagcggaacgggcgtgccaccgcaaacgacagaagagtaatctcaatgccaggtttaagcctggtattaaaagtgctggcaaacgcaaaactgcctgatgcgctacgcttatcaggcctacgtggctcatgcaatatattgaatttgcacgatcttgtaggccggataaggcgttcacgccgcatccggcatgaataaagcgcactttgtcgacaagttaaatgccgggtttaatcccgacattatttttatccagccacaaaactctcttcaacacactgaataaaagtgtgcatcgccgggctaaccgcttttccagcatgatgtgcgcacatggccgtaatggtctggctctgttcgccaaaaggcaattcaattaattctccgcactccaactcttttgccaccgcaaagcgcggtaggtagctgaccccgatattcgccgcgacacaacgcttgatgctttcgatacttataagctcaatggtgttttccaccgtgatccgccgctgacgcagcgtgctctcaaatatctgccggaagacacattgcggttcgttgataataaagctacaggcgttatgtcttcccggctcagtaaaatcgacatctgcaatttgcggactagccaccagcaccagactttgttcacccaactctcgtcgattcagagcatcatcattccctacacgataaaagacgccaacatcggcctcatcattcagtagcgcatcacggatcacgtaacagttcaggctctgcaagcttaaacgcacttttggggcgcgttgccgaaaacgctgcaacacctgcggcattcggtaagagagcaacgtttcgccgctaacaacgcgtagttccccgtccggatcactctcctttttggcagcctcacgaagcgtatccatcactcgggtaagttcataaatgtgcggcagcaacttttttccttcgcgggtaaggcacatccgtcggccaattttctcaaataactggacactaaactcctgctcaagctgctgaatatgaaaagtcaccgtgctttgtgtacagcacaatttttggctagctcgcaaaaaggaaccctcttccaccacggttttaagcgtaataaaacggcgcagatccataaccccaaacctatcgaaaatatcgaatctagaatataaaaacattcatttttttaaatgttccgtgtcgggtactgtctaccaaaacagaggagataacaagtgacaccgacccttttaagtgctttttggacttacaccctgattaccgctatgacgccaggaccgaacaatattctcgcccttagctctgctacgagccatggatttcgtcaaagtacccgcgtgctggcagggatgagtctgggatttttgattgtgatgttactgtgtgcgggcattagttttagtctggcagtgattgacccggcagcggtacaccttttgagttgggcgggggcggcatatattgtctggctggcgtggaaaatcgccaccagcccaacaaaggaagacggacttcaggcaaaaccaatcagcttttgggccagctttgctttgcagtttgtgaacgtcaaaatcattttgtacggtgttacggcactgagcacgtttgttctgccgcaaacacaggcgttaagctgggtagttggcgtcagcgttttgctggcgatgattgggacgtttggcaatgtgtgctgggcgctggcggggcatctgtttcagcgattgtttcgccagtatggtcgccagttaaatatcgtgcttgccctgttgctggtctattgcgcggtacgcattttctattaacgaaaaaaagcggaagaggtcgccctcttccgcttagtaacttgctacttaagccttacaggctttcagtaaaggtacgagcgataacgtcgcgctgctgttccggagtcagagagttaaagcgaactgcataaccggatacacggatggtcagctgcggatatttttccggatgcttaactgcatcttccagagtttcgcgacgcagaacgttaacgttcaggtgttgaccaccttcaacgcgaacttctggtttcacttctactggaacttcacggtattcaatgtcacccagtttgcttactgcaaccacttcatcttctgcataacctgcttttgcaacgatgcaacgcgcttcgcctttttcgctgtccagcagccagaaagagttcagcagatcgtcgttagcggctttagtaatctggatacctgtaatcatgtgatgcctccccggcaaaattatttgatttgttcagcctgtcgcggccaattggtaaaaccattgttgcttgagtgtatatatactcctcaaacacccttgaatctttgatttaaatcaataaaaaccacacatcaagtatggtcgcaaatggattttattgttttacatcaacttatgcgggtgtgaaattttaccaatttacatttttttgcactcgtttaagtctaaaaaatgagcatgattttgttctgtagaaagaagcagttaagctaggcggattgaagattcgcaggagagcgagatggctaacgaattaacctggcatgacgtgctggctgaagagaagcagcaaccctattttcttaatacccttcagaccgtcgccagcgagcggcagtccggcgtcactatctacccaccacaaaaagatgtctttaacgcgttccgctttacagagttgggtgacgttaaagtggtgattctcggccaggatccttatcacggaccgggacaggcgcatggtctggcattttccgttcgtcccggcattgccattcctccgagtttattgaatatgtataaagagctggaaaatactattccgggcttcacccgccctaatcatggttatcttgaaagctgggcgcgtcagggcgttctgctactcaatactgtgttgacggtacgcgcaggtcaggcgcattcccacgccagcctcggctgggaaaccttcaccgataaagtgatcagcctgattaaccagcatcgcgaaggcgtggtgtttttgttgtggggaagccatgcgcaaaagaaaggggcgattatagataagcaacgccatcatgtactgaaagcaccgcatccgagcccgcttagcgcgcatcgtggattctttggctgcaaccattttgtgctggcaaatcagtggctggaacaacgtggcgagacgccgattgactggatgccagtattaccggcagagagtgagtaaatttgcggggaaatgccggatggcagagttgccacccggctgatttatcaggctttattctgacgccaccattcaccaagcaaaacgccggttgcgacagagatattcagcccggcaacgttgcccgtaccgtcaatcttcacgcgcagatcgttcggatcgcgtgcggcatccggtaacccttcatattcctgacccagcaccagtaccattttcgctggcagactagttttgaacagcggtttaccctgctcgctggaagtggtcactacggtgtaacctgcctgacggaaatcatccagcacgttaacaatgttgtcgccagtaatcggctgaacgtgctctgcgccgccttctgcggtacggatagccgccccgctctccagcagtgccgcatcctgcaccacgacacctttcacgccgaagtgcgcgcagctgcgcatcatgccacccaggttatgcgggttagattcgttttccagtgccagaacgcaatcctgcgcgcctgcctggcttacccactgctgcacggttgtaccgttacgctttttgatcaagaagcaaacgccgccgtgatgttccgtgccactcgcttttgtcaattccgcttcatccaccacatggtacgctttgcggtttgctgccatccagcgcaaagcttctttaaaacgcggcgttacactctggataaaccaggcgcgaacaatcgcttccggacggctctggaaaagtgcctgacatgcattttcgccgtagacgcgggtttcttccgcacgctgacgacgcaacacttccggatcaataaaacttttaccactgatgccaccgtgatcggccttttccggcgtctcatcacccggcgcgcgggaaaccgtgcgccacgggctatcttcccacttgcggtcacggggctgactctgtttgtcatcgcgggcggggcgacggccaccgtcagcacgagattttcctggacgcccgccccctttcccggtacgcgggttgtgggtacgtttatcagaatcatcatcactgcggacatacatcactttgaccttgccgcttttacctttcatttcatcgttcatgcttttctccaccagcgctgcgcgaagcgcgcagattacccgaagtccgcgcggttcgccatgatttcgtaccaaagcctgcgactatcatacctattgaataaaacagattgttgtctggaacaatgtccccgataatatgtaacatattagaaacataccggcgtcgttgccgataagtctccttactcatcccgaggttagttatgaataccgtttgtacccattgtcaggccatcaatcgcattcccgacgatcggatcgaagatgcggcaaaatgcggacgctgcggtcacgacttgtttgacggagaggtgattaatgcgaccggtgaaacactcgacaaattgctgaaggatgatctacctgtggtgatcgacttctgggcaccgtggtgcggcccctgccgtaatttcgcaccaatttttgaagatgtcgcgcaagagcgtagcggtaaagtgcgctttgtgaaagtgaataccgaagctgaacgtgaattgagcagtcgctttggaattcgtagtataccgacgatcatgattttcaaaaacggtcaggttgtcgacatgcttaatggcgcagtaccgaaagcgccgttcgatagctggctgaacgaatctctttaatcttaccggggcgcatcttgtgccccgttttctcctctgcgacaatggcgttttttcgacgctctcttatgaccgaaaacgctgttctccagttacgcgccgagcgtattgcgcgcgcaacacgtccttttcttgcccgcggtaatcgcgttcgtcgctgccaacgctgtcttttgccagagaaattatgtctctgtagcacaattaccccagcacaagcaaaaagtcgcttctgtttgctgatgttcgacaccgagccaatgaagcccagtaataccgggcgtctcattgctgatattttgcctgataccgttgcgtttcaatggagccgtaccgaacccagccaggatttgctggagttggtgcaaaacccggactatcagccaatggtggtctttcccgctagctatgctgatgagcaacgggaagtgatcttcacaccacctgccggtaagccaccgctgtttatcatgctcgatggtacctggccggaagctcgcaagatgtttcgtaaaagtccgtatctggataatcttcccgtcatttccgtcgatctttcccggctttctgcctatcgcctgcgtgaagcccaggctgaaggccaatattgtactgccgaggtagccatcgcactgttagatatggccggcgataccggggcggcggcagggttaggcgagcattttacccgctttaaaacacgctatctggcaggaaaaacgcaacatctgggtagcatcacagcagaacagttagaaagcgtttaaaatcattcggtcacttctgcgggagaccggtatgagtcagcgaggactggaagcactactgcgaccaaaaagcatagcggtaattggcgcgagcatgaaacccaatcgcgcaggttacctgatgatgcgtaacctgctggcgggaggctttaacggaccggtactcccggtgacgccagcctggaaagcggtgttgggtgtgttggcctggccggatattgccagcttgccctttacacccgaccttgcggttttatgtaccaatgccagccgtaatcttgctcttctggaagagctcggcgagaaaggctgtaaaacctgcattattctttccgccccggcaagccaacacgaagatctccgcgcctgcgccctgcgccataacatgcgcctgcttggaccaaacagtctgggtttactggctccctggcaaggtctgaatgccagctttagccctgtgccgattaaacgcggcaagctggcgtttattagccaaagcgctgccgtctccaacaccatcctcgactgggcgcaacagcgtaagatgggcttttcctactttattgcgctcggcgacagcctggatatcgacgttgatgaattgcttgactatctggcacgcgacagtaaaaccagcgccatcctgctctatctcgaacagttaagcgacgcgcgacgctttgttagcgcggcccgtagtgccagccgtaataaaccgattctggtgattaaaagcggacgtagcccggcggcacagcgactgctcaacacgacggcaggaatggacccggcatgggatgcggctattcagcgtgccggtttgttgcgggtacaggacacccacgagctgtttagcgcggtggaaacccttagccatatgcgcccgctacgtggcgaccggctgatgattatcagcaacggtgctgcgcctgccgcgctggcgctggatgccttatggagtcgcaatggcaagctggcaacgctaagcgaagaaacctgccagaaactgcgcgatgcactgccagaacatgtggcaatatctaacccgctcgatctacgcgatgacgccagcagtgagcactatattaaaacgctggatattctgctccacagccaggattttgacgcgctgatggttattcatagccccagcgccgctgctcccgcaacagaaagcgcgcaagtattaattgaagcggtaaagcatcatccccgcagcaaatatgtctctttgctgacgaactggtgcggcgagcactccagccaagaggcacgacgtttattcagcgaagccgggctgccgacctaccgtaccccggaaggaaccatcactgcttttatgcatatggtggagtaccggcgtaatcagaagcaactacgcgaaacgccggcgttgcccagcaatctgacttccaataccgcagaagcgcatcttctgttgcaacaggcgattgccgaaggggctacgagcctcgatacccatgaagttcagcccatcctgcaagcgtatggcatgaacacgctccctacctggattgccagcgatagcaccgaagcggtgcatattgccgaacagattggttatccggtggcgctgaaattgcgtagcccggatattccacataaaagcgaagttcagggcgtcatgctttacctgcgtacagccaatgaagtccagcaagcggcgaacgctattttcgatcgcgtaaaaatggcctggccacaggcgcgggtccacggcctgttggtgcaaagtatggctaaccgtgctggcgctcaggagttgcgggttgtggttgagcacgatccggttttcgggccgttgatcatgctgggtgaaggcggtgtggagtggcgtcctgaagatcaagccgtcgtcgcactgccgccgctgaacatgaacctggcccgctatctggttattcaggggatcaaaagtaaaaagattcgtgcgcgcagtgcgctacgcccattggatgttgcaggcttgagccagcttctggtgcaggtttccaacttgattgtcgattgcccggaaattcagcgtctggatattcatcctttgctggcttctggcagtgaatttaccgcgctggatgtcacgctggatatcagcccgtttgaaggcgataacgagagtcggctggcagtgcgcccttatccgcatcagctggaagaatgggtagaattgaaaaacggtgaacgctgcttgttccgcccgattttgccagaagatgagccacaacttcagcaattcattagccgagtcaccaaagaagatctttattaccgctactttagcgagatcaacgaatttacccatgaagatttagccaacatgacacagatcgactacgatcgggaaatggcgtttgtagcggtacgacgtattgatcaaacggaagagatcctcggcgtcacgcgtgcgatttccgatcctgataacatcgatgccgaatttgctgtactggttcgcagcgatctcaaagggttaggcttaggtcgacgcttaatggaaaagttgattacctatacgcgagatcacggactacaacgtctgaatggtattacgatgccaaacaatcgtggcatggtggcgctagcccgcaagctcgggtttaacgttgatatccagctcgaagaggggatcgttgggcttacgctaaatcttgcccagcgcgaggaaagttgagtaaggtactggaaatgttgaccacttaatcgggactggtgttattattgcccgcttatgtcgtctgcattgcacagaggacccttcaatgaacagagaagaaatgcactgtgatgttgagtaaatttaagcgtaataaacatcaacaacaccttgcccaactacccaagatttctcaaagtgttgatgatgtcgatttcttttacgctcccgccgacttccgggagacgctgctggaaaaaatagccagcgcgaagcagcgcatttgcattgtcgccctgtatctcgaacaggatgacggtggcaaaggcattctgaacgcgttgtatgaggctaaaaggcagcgtccggaactggatgtgcgggtgctggtcgactggcatcgtgcacaacgtggacgcattggcgctgcggcatctaacactaacgctgactggtactgccgcatggcgcaggaaaatccgggcgtagatgttccggtttatggcgttccaatcaatactcgtgaagcccttggtgttctgcactttaaaggctttatcatcgacgatagcgtactttatagcggtgccagcctgaacgatgtttacctgcatcagcacgataaatatcgctacgaccgttatcatctgatccgtaaccgtaagatgagtgacattatgtttgaatgggttacacagaatattatgaatggccgcggcgttaatcgtctggatgatgttaatcggccaaaaagcccggaaatcaagaacgatattcgtctgttccgccaggagctgcgtgatgccgcttatcatttccagggcgatgccgacaacgatcagctttctgtaacgccgctagtggggctggggaaaagcagtctgttgaacaagaccattttccatcttatgccttgtgccgagcagaaactaaccatctgtacgccatacttcaacctgccagcaatccttgtgcgcaatattatccagttgctgcgcgaagggaaaaaggtcgaaattattgttggtgataaaaccgcgaatgacttctacattccggaagatgaacctttcaagataattggcgcattgccttatctctatgagatcaatctgcgtcgtttcctgagccgtttgcagtattacgtcaatactgaccagctagtggttcggttatggaaagatgacgacaacacctatcacctgaaagggatgtgggttgatgataagtggatgttgatcaccggtaataacctgaacccgcgcgcctggcgtctggatctggaaaacgccattttgatccacgatccgcaacttgagctggcgccacagcgagagaaagaactggagctgatccgcgagcataccaccatcgttaagcactatcgcgatctgcaaagtattgccgattatccggtgaaggttcgtaaactcatccgccgtttgcgccgtatccgcatcgaccgattaattagccgcatcctgtaatcacaaccccgtcctgtacggggtttgttttttggaggccacgttttgcgtattctttttgtctgttcgctattgttactttctggatgcagccatatggctaacgatagctggagcgggcaggataaagctcaacactttatcgccagcgcgatgctttccgccgccggaaatgaatatagtcagcatcaggggatgagccgggatcgcagtgccatgtttggattgatgttctctgtcagtttgggggcgagtaaagagctttgggatagccgccccgaagggagcggctggagctggaaggatttggcctgggatgtcgccggtgcaagcaccggctataccgtctggcaactgacccgtcattaaagacgcatccccttccctttgcgatgtagcatcaaagaaaccagaaacgccaccacggccatcaaggtcacataccagaagaaggctgtttccattcctatacttttcaggctcaacgctacgtactccgcgctaccaccaaatatagcattagcgaccgcataactcagaccaacgcctaatgcgcgaacctgtgccgggaacatctcagccttcagtattccactgatacttgtataaaaactcactatcagcagggcacacatcaccagaccaaaagcggcataagggctggaaacgttttgcaatgcactgagaataggaacggtaaaaatggctgccaggctaccgaaacataacatactggtacggcgaccaatcttatcgctcagcgcgccaatgagtggttgaataagcatgaatacaaacaatgcggcagtcataatgccactcgccacgttggcatgcattcccgcagtatttaccagatacttctgcatataagtagtgaaggtatagaaacaaagggagcccgcagcggtaaaaccgagaaccatgatgaatgcacggcgattgcgccataatcctttcagagatccagcttcttttaaagcgcgcgtttcttgttggctagtttcatctaactgacgacgtaaccacaacgccacaacagctaacacagctcctaacgcgaaaggaatacgccatccccactctctgagtgcagcgtcttccatggtgtgttgtaaaaccacgacaaccagtagggctagcagttgtccgccgatcaacgtcacatactgaaaacttgcgtaaaaacctttgcgcccttcaacggcaacttcactcatataggtggcgctggtgccatattctccgccaacagataatccctgaaataaacgagcgagaagcaataatgccggagcccacgtacctatagtttcataacctgggaggcaggcgataaccaggcttccgaaacacatcatacacacgcttaacagcatgctttttttgcgaccatgtttatcggctatgcggccaaatagccaaccgcctattgggcgcatcaggaatcccgcagcaaaaacacctgctgtttgtagtagttgagtcgtcgtgttcccggaagggaagaagatgtgggcaaagtagagactacagaagctgtagacatagaaatcgaaccactcgaccagattaccactagaggcccccacaatcgcccaaatgcggcgacgagtatcactacttgtcagtttgctgtctgccgttacagtactttcagccatgccattatgtctcctgccgtaatccgatgcttttgtcggtcgcttttgtttattttttttgtaaaggaaatattatacatttgttgcatatcattatgcaaccttaaccatgaatttagttagcaggaaaatggttattgaggagcttaaggataaatttctggtaaggaggacacgtatggaagtgggcaagttggggaagccgtatccgttgctgaatctggcatatgtgggagtataagacgcgcagcgtcgcatcaggcatttttttctgcgccaatgcaaaaaggccatccgtcaggatggcctttcgcataatttgatgcctggcagttccctactctcgcatggggagaccccacactaccatcggcgctacggcgtttcacttctgagttcggcatggggtcaggtgggaccaccgcgctacggccgccaggcaaattctgttttatcagaccgcttctgcgttctgatttaatctgtatcaggctgaaaatcttctctcatccgccaaaacagcttcggcgttgtaaggttaagcctcacggttcattagtaccggttagctcaacgcatcgctgcgcttacacacccggcctatcaacgtcgtcgtcttcaacgttccttcaggacccttaaagggtcagggagaactcatctcggggcaagtttcgtgcttagatgctttcagcacttatctcttccgcatttagctaccgggcagtgccattggcatgacaacccgaacaccagtgatgcgtccactccggtcctctcgtactaggagcagcccccctcagttctccagcgcccacggcagatagggaccgaactgtctcacgacgttctaaacccagctcgcgtaccactttaaatggcgaacagccatacccttgggacctacttcagccccaggatgtgatgagccgacatcgaggtgccaaacaccgccgtcgatatgaactcttgggcggtatcagcctgttatccccggagtaccttttatccgttgagcgatggcccttccattcagaaccaccggatcactatgacctgctttcgcacctgctcgcgccgtcacgctcgcagtcaagctggcttatgccattgcactaacctcctgatgtccgaccaggattagccaaccttcgtgctcctccgttactctttaggaggagaccgccccagtcaaactacccaccagacactgtccgcaacccggattacgggtcaacgttagaacatcaaacattaaagggtggtatttcaaggtcggctccatgcagactggcgtccacacttcaaagcctcccacctatcctacacatcaaggctcaatgttcagtgtcaagctatagtaaaggttcacggggtctttccgtcttgccgcgggtacactgcatcttcacagcgagttcaatttcactgagtctcgggtggagacagcctggccatcattacgccattcgtgcaggtcggaacttacccgacaaggaatttcgctaccttaggaccgttatagttacggccgccgtttaccggggcttcgatcaagagcttcgcttgcgctaaccccatcaattaaccttccggcaccgggcaggcgtcacaccgtatacgtccactttcgtgtttgcacagtgctgtgtttttaataaacagttgcagccagctggtatcttcgactgatttcagctccatccgcgagggacctcacctacatatcagcgtgccttctcccgaagttacggcaccattttgcctagttccttcacccgagttctctcaagcgccttggtattctctacctgaccacctgtgtcggtttggggtacgatttgatgttacctgatgcttagaggcttttcctggaagcagggcatttgttgcttcagcaccgtagtgcctcgtcatcacgcctcagccttgattttccggatttgcctggaaaaccagcctacacgcttaaaccgggacaaccgtcgcccggccaacatagccttctccgtccccccttcgcagtaacaccaagtacaggaatattaacctgtttcccatcgactacgcctttcggcctcgccttaggggtcgactcaccctgccccgattaacgttggacaggaacccttggtcttccggcgagcgggcttttcacccgctttatcgttacttatgtcagcattcgcacttctgatacctccagcatgcctcacagcacaccttcgcaggcttacagaacgctcccctacccaacaacgcataagcgtcgctgccgcagcttcggtgcatggtttagccccgttacatcttccgcgcaggccgactcgaccagtgagctattacgctttctttaaatgatggctgcttctaagccaacatcctggctgtctgggccttcccacatcgtttcccacttaaccatgactttgggaccttagctggcggtctgggttgtttccctcttcacgacggacgttagcacccgccgtgtgtctcccgtgataacattctccggtattcgcagtttgcatcgggttggtaagtcgggatgacccccttgccgaaacagtgctctacccccggagatgaattcacgaggcgctacctaaatagctttcggggagaaccagctatctcccggtttgattggcctttcacccccagccacaagtcatccgctaatttttcaacattagtcggttcggtcctccagttagtgttacccaaccttcaacctgcccatggctagatcaccgggtttcgggtctataccctgcaacttaacgcccagttaagactcggtttcccttcggctcccctattcggttaaccttgctacagaatataagtcgctgacccattatacaaaaggtacgcagtcacacgcctaagcgtgctcccactgcttgtacgtacacggtttcaggttctttttcactcccctcgccggggttcttttcgcctttccctcacggtactggttcactatcggtcagtcaggagtatttagccttggaggatggtccccccatattcagacaggataccacgtgtcccgccctactcatcgagctcacagcatgtgcatttttgtgtacggggctgtcaccctgtatcgcgcgcctttccagacgcttccactaacacacacactgattcaggctctgggctgctccccgttcgctcgccgctactgggggaatctcggttgatttcttttcctcggggtacttagatgtttcagttcccccggttcgcctcattaacctatggattcagttaatgatagtgtgtcgaaacacactgggtttccccattcggaaatcgccggttataacggttcatatcaccttaccgacgcttatcgcagattagcacgtccttcatcgcctctgactgccagggcatccaccgtgtacgcttagtcgcttaacctcacaacccgaagatgtttcacttcagagttgcgaaaatttgagagactcacgaacaactttcattgttcagtgtttcaattttcagcttgatccagatttttaaagagcaaatatatcaaacaagacttaacagtctgttttgagatattgaggtcggcgactttcactcacaaaccagcaagtggcgtcccctaggggattcgaacccctgttaccgccgtgaaagggcggtgtcctgggcctctagacgaaggggacacgaaaattgcttatcacgcgttgcgtgatattttcgtgtagggtgagctttcattaatagaaagcgaacggccttattctcttcagcctcactcccaacgcgtaaacgccttgctattcacttttcatcagacaatctgtgtgagcactgcaaagtacgcttctttaaggtaaggaggtgatccaaccgcaggttcccctacggttaccttgttacgacttcaccccagtcatgaatcacaaagtggtaagcgccctcccgaaggttaagctacctacttcttttgcaacccactcccatggtgtgacgggcggtgtgtacaaggcccgggaacgtattcaccgtggcattctgatccacgattactagcgattccgacttcatggagtcgagttgcagactccaatccggactacgacgcactttatgaggtccgcttgctctcgcgaggtcgcttctctttgtatgcgccattgtagcacgtgtgtagccctggtcgtaagggccatgatgacttgacgtcatccccaccttcctccagtttatcactggcagtctcctttgagttcccggccggaccgctggcaacaaaggataagggttgcgctcgttgcgggacttaacccaacatttcacaacacgagctgacgacagccatgcagcacctgtctcacggttcccgaaggcacattctcatctctgaaaacttccgtggatgtcaagaccaggtaaggttcttcgcgttgcatcgaattaaaccacatgctccaccgcttgtgcgggcccccgtcaattcatttgagttttaaccttgcggccgtactccccaggcggtcgacttaacgcgttagctccggaagccacgcctcaagggcacaacctccaagtcgacatcgtttacggcgtggactaccagggtatctaatcctgtttgctccccacgctttcgcacctgagcgtcagtcttcgtccagggggccgccttcgccaccggtattcctccagatctctacgcatttcaccgctacacctggaattctacccccctctacgagactcaagcttgccagtatcagatgcagttcccaggttgagcccggggatttcacatctgacttaacaaaccgcctgcgtgcgctttacgcccagtaattccgattaacgcttgcaccctccgtattaccgcggctgctggcacggagttagccggtgcttcttctgcgggtaacgtcaatgagcaaaggtattaactttactcccttcctccccgctgaaagtactttacaacccgaaggccttcttcatacacgcggcatggctgcatcaggcttgcgcccattgtgcaatattccccactgctgcctcccgtaggagtctggaccgtgtctcagttccagtgtggctggtcatcctctcagaccagctagggatcgtcgccttggtgagccgttaccccaccaacaagctaatcccatctgggcacatccgatggcaagaggcccgaaggtccccctctttggtcttgcgacattatgcggtattagctaccgtttccagtagttatccccctccatcaggcagcttcccagacattactcacccgtccgccactcgtcagcgaagcagcaagctgcttcctgttaccgttcgacttgcatgtgttaggcctgccgccagcgttcaatctgagccatgatcaaactcttcaatttaaaagtttgatgctcaaagaattaaacttcgtaatgaattacgtgttcactcttgagacttggtattcatttttcgtcttgcgacgttaagaatccgtatcttcgagtgcccacacagattgtctgataaattgttaaagagcagtgccgcttcgctttttctcagcggcgcggggtgtgcataatacgccttcccgctacagagtcaagcatttctttgcttttctctgttgagattctcaggagaaccccgccgacccggcggcgtgtttgccgttgttccgtgtcagtggtggcgcattatagggagttattccggcctgacaagcgaaaaatataaaaactttatcgttcgctcacttttcaggcaaaacatcttaaatatagtcttttccgtctaacttatagacaaaaacgagccccgaagggctcgttttatcatttactggacggcgacaatccggtcttcattaacttccaggcgaatcactttacccggaaccaattcaccagacagtatttgctgtgccagcgggttttcgatctgctgctgaattgcacgtttcagaggacgtgcaccatagaccggatcgtaaccgttctcgctcagcagtttcagcgcctcgtcagaaatgtggatttcataaccacgttcttccagacgtttgtacagacgtttcaactgaatctgcgcaatgctggcaatgtgctgttcacccagcggatggaagaccaccacttcatcgatacggttaatgaattccggacggaagttatggcttaccacaccgagcaccagctctttcatgtgcgcataatccagttcaccgaagcgttcctgaatcagatcggaaccgaggttagaggtcataatgacgaccgtattacggaagtcgaccgttctcccttgcccgtcagtcagacgcccatcatccagtacctgcaacagaatgttgaagacatccggatgcgctttttccacttcatccagcaggatgacggaatacggacgacgacgcaccgcttcggtcaggtagccaccttcttcataaccgacatatcccggaggcgcaccaaccaaacgagacacgctgtgtttctccataaactcggacatatcgatacggaccatcgcctcgtcgctatcaaacataaagttcgccagcgccttacaaagctctgttttccccacaccagttgggccgaggaacaggaaactaccaatcgggcgatttggatccgccagccccgcacggctacgacgaatagcgttagataccgcatcaaccgcttcgttctgaccaattacgcgatggtgcagttcttgctccatacgcagcagtttttcgcgctcgctttccatcatgcgagaaaccggaatccccgtccaacgcgccagcacttcagcaatttcggcgtcggtcactttattacgcaacagacgcatagttttgccttcgagctgcgttgcggcttccagttgcttttccagttccgggattttgccgtattgcagttcagacatccgcgccaggtcccccacacggcgagcctgttcaatagcgattttcgcctgttccagttccgctttaatggtctgcgtaccagaaaggcttgccttctctgctttccactcttcttctaactcggagtactgacgttctttgtcgctcagttcttcgttgagcatatccagacgttttttactggcttcatcagactctttcattaacgcctgttgttccagtttgagctggatgatacgacgatcgagtcggtcgagttcttctggtttactgtcaatctgcatacgaatgctggatgctgcttcatcgatcaggtcgatggctttatccggcagctgacggtcagcaatgtagcgatgagacaacgtcgccgctgcaacaattgccgggtcagtaatttgcacatggtggtgcaattcgtaacgttctttcaggccacgcagaatcgcaatggtatcttcaacagaaggctcggcaacaaacactttctggaaacgacgttccagcgcagcatctttttcaatgtactggcgatattcgtcaagcgtcgtggcacctacgcagtgcaattcaccacgcgccagcgccggtttcagcatgtttccggcgtccattgcgccatcggctttacccgcgccgaccatggtatgtaattcgtcgataaataggatgacgttgccttcctgtttggcaagatcgttaagcacgccttttaaacgttcttcaaactcaccgcgatatttcgccccagccaccagcgcgcccatatccagcgccagtacccggcggcctttcaacccttccggcacttcgccgttgataatacgctgcgccagaccttcaacgatggcagttttaccgacgccgggttcaccaatcagtaccgggttatttttagtacgacgttgcagcacctgaatggtacggcgaatttcttcatcacgaccaatcaccggatcgagtttgccctgttcggctcgttcggtaaggtcgatggtatattttttcaaagcctgacgttggtcttcagcaccttgatcgttcacgctttcacctccacgcatttgttcaatcgcttgagtaatgttggcggtggtcgcccctgctgctttcaggatgtcggccagcgtgccgcgagactcaagtgccgccagaacgaacagttcactgctgataaagttatcaccacgtttttgcgccagcttgtcgcaaagattaagaacgcgcaccagatcctgacttggctggacatcaccaccagtaccttcaacctgcggtaaacgatttaatgcctgattgatatctgtgcgcaactggccagcatttatgccagcggatgttaataaaggactaacgctacccccttcctgattcagcagggcgctcattaaatgaagtggttcgataaattggttgtcgtgcccgagtgcaagactttgggcatcggcaagagcaagctggaatttattagtaagacgatccagacgcataactcctcccataacggatcaaagttgctactggagattaaatgaggtcatccctcaattattcaaggttattgaccagattaatgtgaaaagaaaatcacgcgtaccggatcgtcttgattctttaggttatatcagccaaatgaaacttgccatacgaccggtggtcttgtcgcgacgataagagaagaaagtctcattttccgtatatgtacaacggtcgccgccgaaaatttgctcaacacccacgttcgccagacgctgccgggcaagctgataaatatccgccagatacttatcaccatgctgaatgaaagctgcacttgctttagcgtctactgccataaacgcctcgcgaacctccccccccacttcgaacgcgcgtggaccaattgccggccctaaccaggcgagaatattttccggattatcagcaaaacaggaaaccgtctcttccagcacgcctgcgcacagtccacgccagccagcatgagcggcggcgacttccgttcccgctcgattgcaaaacagcacagggaggcagtcggcagtcatcactgcgcaaaccgtgccgggcgtattgctataagaggcatccgcccgtttactggcataaggttcgccagtgagcttaagcacatctttgccgtgtacctgctcaagccagaccggtttagaaggcaaattgcccgcagcaaaaagtcgcttgcgattctcctcaacgtgatccgggttatcgccacaatgggcaccgaggttgagactgtcatacgggggcaagctcacgccgccgatacgagtggagctacaggccgcaacaccttttggctgcggccactgcgggacaatcagcttactcataaccagtccacttcatccttatgttcttcgaaatcggcgcgcatcacctcaatcagctccaccatatcttgtggaataggcgcatgccattccatttcgatgccggagatcgggtgataaagacgcagcatggttgcatgtagcgcctggcggtcaaacttacgcagcgtggagataaatgcttcgctagcaccttttggcggacgcggacggccaccataaaccggatcgcccaccagcggatgagtgatatgggccatatgcacgcggatctggtgcgtacgtccagtttccagacgcaaccgcagacgcgtgtgcacacggaagtgttccatgatgcgatagtgagtcaccgctggtttgcccatcggatgcaccgccatatgggtacgtttggtcgggtggcgactgattggctcgtccaccgtgccacctgcggtcatatgaccaatcgccaccgcttcatactcacgagtaatttcacgccgttgcaaagattcgactaaacgcgtctgagccggaacggtttttgccacaaccatcaggccagtggtgtctttatccagacgatggacgatgcccgcacgcggtacatcggcaatgggtggatagtaatgaagcaacgcattcagtaccgtgccatccgggttacccgcgccaggatgtaccaccaggtcgcgcggtttattaatgataataatgtcttcatcttcatagacgatatccagcgggatatcctgcggttcaaaacgcgcttcttcttcaatctcagcgttgatggcaacctgctcgccacccaatactttttctttcggcttatcacaaactttgccgttaaccagcactcgctggtcgaggatccattcttttattcggctacgactataatccgggaacatttcggccaaagcctgatctaagcgttgaccgagttggttttcggacaccgttgcagtgagctgtactcgttgtgccatatatactgcttcttcgtttatcgttggggttttacggctttgccgtttaatatagtgtgctattgtagctggtcttaaccgggagcaggaacagagaatctcccgtattacattttgaggaaagtcaaaacgtcatgacgcgcatgaaatatctggtggcagccgccacactaagcctgtttttggcgggttgcagcgggagtaaggaagaagtacctgataatccgccaaatgaaatttacgcgactgcacaacaaaagctgcaggacggtaactggagacaggcaataacgcaactggaagcgttagataatcgctatccgtttggtccgtatagccagcaggtgcagctggatctcatctacgcctactataaaaacgccgatttgccgttagcacaggctgccatcgatcgttttattcgccttaacccgacccatccgaatatcgattatgtcatgtacatgcgtggcctgaccaatatggcgctggatgacagtgcgctgcaagggttctttggcgtcgatcgtagcgatcgcgatcctcaacatgcacgagctgcgtttagtgacttttccaaactggtgcgcggctatccgaacagtcagtacaccaccgatgccaccaaacgtctggtattcctgaaagatcgtctggcgaaatatgaatactccgtggccgagtactatacagaacgtggcgcatgggttgccgtcgttaaccgcgtagaaggcatgttgcgcgactacccggatacccaggctacgcgtgatgcgctgccgctgatggaaaatgcataccgtcagatgcagatgaatgcgcaagctgaaaaagtagcgaaaatcatcgccgcaaacagcagcaatacataacagaaacctgaaacacaaaacggcagcccttgagctgccgtttttttattctgtcagttgtgaaactgaagcgatttagtcgctatcgatctcatcaaatatggctcgctttgagatattcctcaagtaaaaaaacatctcttcctgcgatttctcacaaaaaagattcgttgacaaaaagtgacaaaattatgagattttcatcacacattttgacatcaggaacggtatgctgaattcaccaagacgggaagacaagaggtaaaatttatgacaatgaacattaccagcaaacaaatggaaattactccggccatccgccaacatgtcgcagaccgtctcgccaaactggaaaaatggcaaacacatctgattaatccacatatcattctgtccaaagagccacaagggtttgttgctgacgccacaatcaatacacctaacggcgttctggttgccagtggtaaacatgaagatatgtacaccgcaattaacgaattgatcaacaagctggaacggcagctcaataaactgcagcacaaaggcgaagcacgtcgtgccgcaacaagcgtgaaagacgccaacttcgtcgaagaagttgaagaagagtaatcctttatattgagtgtatcgccaacgcgccttcgggcgcgttttttgttgacagcgtgaaaacagtacgggtactgtactaaagtcacttaaggaaacaaacatgaaacacataccgtttttcttcgcattcttttttaccttcccctgaatgggaggcgtttcgtcgtgtgaaacagaatgcgaagacgaacaataaggcctcccaaatcggggggccttttttattgataacaaaaaggcaacactatgacaagcgaaaacccgttactggcgctgcgagagaaaatcagcgcgctggatgaaaaattattagcgttactggcagaacggcgcgaactggccgtcgaggtgggaaaagccaaactgctcagccatcgcccggtacgtgatattgatcgtgaacgcgatttgctggaaagattaattacgctcggtaaagcgcaccatctggacgcccattacattactcgcctgttccagctcatcattgaagattccgtattaactcagcaggctttgctccaacaacatctcaataaaattaatccgcacagtgcacgcatcgcttttctcggccccaaaggttcttattcccatcttgcggcgcgccagtatgctgcccgtcactttgagcaattcattgaaagtggctgcgccaaatttgccgatatttttaatcaggtggaaaccggccaggccgactatgccgtcgtaccgattgaaaataccagctccggtgccataaacgacgtttacgatctgctgcaacataccagcttgagcattgttggcgagatgacgttaactatcgaccattgtttgttggtctccggcactactgatttatccaccatcaatacggtctacagccatccgcagccattccagcaatgcagcaaattccttaatcgttatccgcactggaagattgaatataccgaaagtacgtctgcggcaatggaaaaggttgcacaggcaaaaagtccgcatgttgctgcgttgggaagcgaagctggcggcactttgtacggtttgcaggtactggagcgtattgaagcaaatcagcgacaaaacttcacccgatttgtggtgttggcgcgtaaagccattaacgtgtctgatcaggttccggcgaaaaccacgttgttaatggcgaccgggcaacaagccggtgcgctggttgaagcgttgctggtactgcgcaaccacaatctgattatgacccgtctggaaagtcgcccgattcacggtaatccatgggaagagatgttctatctggatattcaggccaatcttgaaagtgcggaaatgcaaaaagcattgaaagagttaggggaaatcacccgtagtatgaaggtattgggctgttacccaagtgagaacgtagtgcctgttgatccaacctgatgaaaaggtgccggatgatgtgaatcatccggcactggattattactggcgattgtcattcgcctgacgcaataacacgcggctttcactctgaaaacgctgtgcgtaatcgccgaaccagtgctccaccttgcggaaactgtcaataaacgcctgcttatcgccctgctccagcaactcaatcgcctcgccgaaacgcttatagtaacgtttgattaacgccagattacgctcactgctcataatgatgtcggcataaagctgcggatcctgagcaaacagtcgcccgaccatcgccagctcaaggcggtaaatcgggctagagagcgccagaagttgctcaagctgaacattttcttctgccaggtgcagcccgtaagcaaaagtagcaaagtggcgcagtgcctgaataaacgccatattctgatcgtgctcgacggcgctaatacgatgcagccgagcgccccagacctgaatttgctccagaaaccattggtatgcttccggtttacgtccatcacaccagaccacaacttgctttgccaggctaccgctgtccggaccgaacatcgggtgtagccccagcaccggaccatcatgcgccaccagcatggcctgtaatggcccatttttcacacttgccagatcgaccagaatacaatctttcggtaaaggcggtaatttgccaataacttgctcagtaacgtggattggcacactaacaatcaccattccggcatcggcaacaatatcagccgctcgatcccagtcatgttgctccagaatccgcacctgataaccgctgagggtcagcatcttctcgaacaggcgtcccatctgaccgccaccgccgacgataaccaccggacgcagactcggacaaagtgttttaaatcctttgtcgttttcactggagtaagattcacgcatcacccgacgcaaaacatcctcaatcagatctggcggtacacccagagcttccgcctctgcacgacggctggccaacatagatgcctcgcgctccggaacataaataggcagtccaaagcggcttttcacctcgcccacttcagcaaccagttccagacgcttcgctaataaattcagcagcgctttatcgacttcatcaatttgatcgcgtaatgcggtcaattcagcaaccataataaacctcttaagccacgcgagccgtcagctgcccgttcagatcctgatgaatttcacgcagcaaggcatcggtcatttcccagctaatgcaggcatcggttacggatacaccgtatttcatttcactgcgcggttgctcggaagactgattgccctcgtggatattactttcgatcatcagaccaataatactgcgattgccatctttgatttgagcaaccacggattctgccaccgcaggctgacggcgataatctttattggaattaccgtggctgcaatctaccatcagagacgggcgcagtcccgcctgttccatctctttttcacattgcgcaacatccgcagggctatagttcggcgctttaccaccgcgcaggatcacatggccgtccggattcccctgagtttgtagcaacgcaacctgccctgcctggttaatgccaacaaaacggtgcggctgggcggcggcgcgcatagcgttaattgctgttgccagactgccgtcggtgccgtttttaaaaccaaccggcatggaaagcccggaggccatttcacggtgagtttggctttccgttgtacgagcaccaattgcactccagctaaacagatcgcccaggtattgcgggctattcggatctaacgcttccgtcgccagtggcagtcccatattcaccagctcaagcagcaatttacgcgcgatctgcagcccggcttctacatcaaaagagccatccatatggggatcgttaattaaccctttccagccgacagtggtacggggtttttcaaaatagacgcgcattaccagatagaggctatcgctgacctctgcggcaagggctttaaatcgacgagcatattccagagcagtttccggatcatgaatggaacaaggaccacatactaccagcagacgaggatcgcgcccggcgataatatcactaatgcttttacggctgtcagcaatctgggcttcttgttgcaggctcaatggaaaagcggccttcagttgttccggagtcattaaaacctgttcgtcggtaatatgtacgttattcagcgcgtctttttgcatgatggcgatcctgtttatgctcgtttgcgatagttgatcctcagcgaggatgacgtaacgataacacataaagtaaagttttcaatccatatttcgtacatttttatttacacaggcaatttagtcgcgctttcaacccttacctctgtatagataaatttacactccctttgaaaacaatccgctatgctttgaaaaaggagaaagaaatgatgaaaaagtttatcgcccccttgttggctttactggttagcggatgtcagattgatccttatactcacgcgccaaccttgaccagcaccgactggtatgatgtcggtatggaagatgcgataagcggcagcgccataaaagatgacgatgcatttagcgatagtcaggcggatcgcggtctataccttaaaggatatgccgaaggacaaaagaaaacttgccagaccgattttacttatgcccgaggactttccggtaaaagctttcctgccagctgcaacaatgttgaaaatgccagccaactgcatgaagtaggcaaaaaggggctgatgaaaatgccagcacaatacgattaaattaattaaaaccccacaaataaattaaacataagattttactcattgtgttttatttctcacattgatgacggtcgcatgaaaaaatgatattttaatgagcattctgaaaaaatatcgatgcatttcgagcgaagatggtggggatccctgaatgcgtttttctcaccgactgttcttacttctgattctcctgctgacgggagcaccaatactcgctcaggagccttctgacgttgcgaaaaacgtgcgtatgatggtttccggtattgtcagttacacccgctggcctgcgctaagtgggccaccaaagttatgtatctttagttctagtcgttttagtaccgccctacaagagaatgccgcgacatctttgccttatctgcctgtcatcattcacactcaacaagaggcgatgattagtggctgcaatggtttttattttggcaacgagagtccgacattccagatggaattaaccgaacaatatccgagtaaggcgttattattaattgccgaacaaaataccgagtgcattattggtagcgccttttgtctgatcatccacaataatgacgtcagatttgccgtaaacctggatgccttaagccgtagcggtgtaaaggtcaacccggatgtcttaatgctcgcacggaagaaaaatgatggataacgataattctcttaataagcgccccacgtttaaaagagcattacgcaacatcagtatgaccagcatatttatcactatgatgctgatctggttgctgctttccgtgaccagcgtgctgaccctgaaacagtacgcgcaaaaaaacctggcactgacagcagcaacaatgacttacagtctggaagcagctgtcgtttttgccgatggccctgcagcaactgaaacactggcagcgctgggccagcaagggcaatttagtactgcagaagtacgtgataagcagcaaaatattctggcatcctggcattacacccgtaaggatccaggcgatactttcagtaatttcataagccactggctcttccctgcccccatcattcagccgattcgtcacaatggtgaaaccattggcgaagtacgcttaaccgctcgcgacagtagtatcagccattttatctggtttagcctcgccgtactgaccggttgtattctgctggcaagtggcatcgcaattaccctcacccgccatttgcacaatggcctggtagaagcgctgaaaaatatcaccgatgtcgtacatgatgtgcgttccaaccgcaatttttcccgacgagttagcgaagaacgtatcgctgagtttcaccgcttcgctctcgacttcaacagtctgctggatgaaatggaagagtggcagcttcgtttacaggctaaaaatgcgcagcttctacgtaccgcgctacatgacccattaaccgggctggctaaccgcgcagcgtttcgtagcggcatcaacacgttgatgaacaattccgatgcccgaaaaacgagcgcgttactatttcttgatggcgataatttcaaatacatcaatgatacctggggtcatgcgacgggcgatagagtcttgattgaaatcgcaaaacggttagctgaatttggcgggctgcgacataaagcataccgcctgggcggcgatgaattcgctatggtgctctatgatgtacagagcgaatctgaagtgcagcagatatgtagtgcactgacacaaatctttaatctcccgtttgatcttcataatggccatcagaccaccatgacattaagcattggttacgcgatgaccattgagcacgcctctgcggaaaaattacaagagcttgccgatcacaatatgtatcaggccaaacaccagcgtgccgaaaagctggtgagataacaaggatatatcgatatgataaagcacctggtagcacccctggttttcaccagtctaatactgactggctgccagtcccctcagggaaagtttactcctgagcaagtcgccgctatgcaatcttatggatttactgaatccgccggcgactggagcctgggcttaagtgatgccattctgttcgcaaaaaatgactacaaattgctcccggaaagccagcaacagatccaaaccatggcagctaaattggccagcacagggctaacacatgcccgtatggatggacacaccgataactatggtgaagacagttacaacgaaggcttaagtttgaaacgggcgaatgtcgtggccgatgcatgggctatgggtggacaaattccacgcagcaatctcaccacacagggtttaggaaaaaaatatcccatagccagtaacaagaccgcccagggccgcgccgagaaccgccgcgtcgcagtggtgattactaccccttaaaacaccagcaaacagataaaaaagggccagccaattggccagcccttcttaacaggatgtcgcttaagcgaaatcttagttaagacgctctttgatacgagcagccttaccagtacgctcacgcaggtagtacagtttagctttacgaacagcaccacgacgtttgacagaaatgctgtcaactaccggagagtgagtctggaagacacgctcaacgccttcgccgttggaaattttacgaacagtgaatgcagagtgcagaccgcggttacgaatagcgataaccacgccctcgaatgcctgcagacgttttttggaaccttcaacaacccatactttcacttccacggtatcacccggacggaaggaaggtacgtcctgcttcatctgctcttgttcaagttgcttaataatgttgctcataatttaatctcttatcctgggtaaactgatatctcgggggcttacgccatcccatcatgtttatgttgctgttgtgcgtgttccgttttgaactccgccagcaaccttgcttgctcttcagtcagagccaggttttccagaagttcaggtcttctaagccaggtacggcccaggctctgtttcaaacgccagcgacgtatctcggcatggttgccgctcagtaacactggcggaacttccatcccttctaacacctcaggccgcgtatagtgcgggcaatccagcaatccttcagcaaaggaatcttccgttgcgctggcttcatgtcccagtactcccggaataaaccgggaaacggagtcaatcagcgtcattgctggtaactcaccaccactgagaacgtaatcgccgatactccattcttcgtcaatttcggtttggatcacgcgctcatctataccttcgtagcgaccgcacaccagaatcaatttttgattcgttgccagttcgctgacgcccgcttgatcaagcttgcgtccctgtggactcagataaatcacctttgcgccttcacccgccgcggcttttgctgcatgaatggcgtcccgcaagggttgcaccatcattaacatccccggtccgccgccgtaaggacgatcgtccacggtacggtgccggtcatgcgtgaagtcgcgaggactccagctctggatgctcagcaggccatttttaactgcccggccagttaccccgtaatcggtaattgcgcggaacatttcaggaaacaggctaattatgccaatccacatagcgccgtcttttaccgtttatccggtggtttaaaaaccaggatcccaatctacttcgatactacgagtagtgagatcgactttcttgataacctgcccatcgaggaacggtacgagacgttccttgataccaaacgcatctttcaggtttgccttaatgacgagaacgtcattagatccggtttccatcatatcgacgactttaccgagatcgtagccttcagtggttactacctggcagcccatcaggtctttccagtagtagtccccctcttcaagctgaggcagctggctactatccacgacaatttcacaattcgtcagcaggttcgccgcatcacgatcgtcaacgcctttcagcttgatgatcatgtcctgattgtggtgcttccagctttccagctggacttgctgccactgacccgccttctggataaaccagggctgatagtcaaaaatgctttcggcgtcttcggtggaagaaaacactctgagccacccacgaataccgtaagagctacccatttttcccaaaacgatgggatcaacaggtgcttgcgcggtgagttgtttgctcatcatgaccaccgtgacagattaagctgctttgtttacttctttgatcagcgcagcaacgcgatcagaaatagttgcgccctggccaacccagtgagcgatgcgatccagatccaggcgagtgccttcttctttttcgctagcgattgggttgaagaaaccaacgcgctcgatgaagcgaccgttgcgtgcattacggctgtcagcgacaacaacctggtagaacggacgctttttagcgccgtgacgtgctaaacgaatagttaccataacatcctcttgtgtgaataaaacaaccggaccccatcgaggaacggagtccggtgtcatattaaaagcccgaaaattttactcatttttgcgggaattgcaatcaacagttgctaactctgctgtaaaaggccgtcggcggtgcagccagtttggtgccggagtgcgcgcagtcaccggagcgtacacgcagtacgtgaggatgacgagcacatcccggtgccaaaatggcaaacaagccaggccgattagcgaccagggaagcctgggggcatcatacccttcatgcttctcatcatcttcgccattccgcccttcttcattttcttcatcatgcgctgcatgtcgtcgaactgtttcagaagacggttaacgtcctgcacctgcataccgcaaccggcagcaatacggcgtttacggctacctttgatgatttctggcttagcgcgctctttcatcgtcatgctgttgatgatggcttccatacgcaccagcactttatcgtccatctgactcttgacgttatccgggatctgccccatgcccggcagcttgcccatcagactagccatgccgcccatatttttcatctggcgcagctgctcaagaaagtcgttgagatcgaagccgtcaccttttttcagcttgctggctaatttctctgcctgcgcgcggtcaactttgctttcgatatcttcgatcaggctcagtacgtcgcccatgccgagaatacggctcgcgatgcggtccggatggaacggctccagcgcctcagttttctcgccaacaccgaggaacttgatcggtttgccagtgatgtgacgaatagagagcgccgcaccgccgcgggcatcgccgtccactttggtcaacactacgccggtaagcggtaacgcttcattgaatgcttttgccgtattggccgcatcctgaccggtcatggcgtcaaccacaaacagggtttcaaccgggttaatgctcgcatggacttgtttgatctcgtccatcatcgcttcgtcaacgtgcagacgaccagcggtatccaccagcagcacgtcgtagaatttcagtttggcttctttcagcgccgcgttaacgatatctaccggcttctgaccaacatcagaagggaagaaatcaacgcccacctgctctgccagcgtctcaagctgtttgattgccgccgggcgataaacgtcggcagaaaccaccagcactttcttcttgtgcttctcgcgcaggaacttaccgagtttaccaacgctggttgttttaccggcaccttgcaggcccgccatcagtacgaccgcaggcggttgcgcagccaggttcagggtctggttctcttcgcccatcgccgcaaccagttcgttacggactattttgacgaactcctgccccggcgtcaggctcttattaacttcatgaccaaccgctttctcttttacgcgattgataaactcacgcactaccggcagagctacgtccgcctccagcagcgccatgcgcacttcgcgcagcgtatcttttacgttgtcttcagtgaggcgtccacggccactgatattgcgcagcgtgcggctcaaacgatcggttaaattatcaaacattgtctctcgcctggggtggaaacggttggccgcaatcgcgacacatcatcagtattttgccgcagtataacatgaaggcgtctttgttgttatgcaacggttggagcagcgtagtcctgacgctatactgcttctctttcttattgctcaaactgtcgacatcactatgcccgtttttgctctgctcgcgcttgtcgcctactccgtcagtcttgcgctgattgttcccggtctgctgcaaaaaaacggcggctggcggcgcatggctattatttctgcggtcattgcgctggtctgccacgcaatcgctctggaagcccgcatcctgcccgacggtgatagcggacaaaacctcagcctgctgaacgttggtagtttggtcagtttgatgatctgtacggtaatgaccattgtggcttctcgcaatcgtggctggctgctgctacccattgtctatgcctttgcgcttatcaacctggcgctggcaaccttcatgcccaatgaatacatcacccatctggaagctacgcctgggatgctggtgcacattggcttaagcctcttttcctatgccacgctaattatcgccgccctgtacgcgctgcaactggcgtggattgattaccaactgaagaacaagaagctggcgtttaaccaggaaatgccgccattgatgagtatcgagcgtaaaatgttccacatcacgcagattggcgtggtgctgctaacgctcacgctttgcactggcctgttctacatgcacaacttatttagcatggaaaatatcgacaaggctgtgctctctatcgtggcgtggtttgtctatattgtgctgctgtggggacattatcatgaaggatggcgtggacgccgcgtcgtctggtttaacgttgcgggcgcggtaattctgacactggcctacttcggcagccgaattgtccagcagttaatcagctaaacccagaaaaggagtttcccctggaacacatttctactactacgttgatcattattctgatcatcatggtggtcatttcagcctatttttccgggtccgaaaccggaatgatgaccctcaaccgctatcgtctgcgacatatggcgaaacagggtaatcgcagcgccaaacgcgtcgaaaaattgctgcgtaagccagaccgcctgataagcctggtgttaatcggcaataacctggtcaatattcttgcctccgcgctcggcactattgttgggatgcgtttgtacggcgatgcgggcgtggcaattgcgactggtgtgctgacttttgtcgtactggtatttgctgaggtattgccgaaaaccattgccgcgctgtacccggaaaaagtcgcttatccgagtagttttctgctggctccgctgcaaattttgatgatgccgctggtctggttgctgaatgctatcacccgtatgctgatgcgcatgatgggtatcaaaaccgatatcgtggttagcggctctttgagcaaagaagagttgcgcactatcgtgcacgaaagtcgcagtcaaatttcccgtcgcaatcaggatatgctgctgagcgtgctcgatctggaaaaaatgaccgttgatgacatcatggtgccgcgcagtgaaattatcggtattgatatcaacgatgactggaaaagcattctgcgccaactctcccacagtcctcacgggcgcatcgtgctctaccgtgatagcctggacgacgccatcagtatgctgcgagtacgtgaagcctggcggttgatgagcgagaaaaaagagttcaccaaagaaaccatgctgcgcgccgcggacgagatctattttgtgccggaaggtacgccgctcagcacgcagttggtaaagtttcagcgcaacaaaaagaaagtcggcctggtcgtcaacgagtatggagacattcaggggctggtgacggttgaagatattctggaagagattgtcggcgatttcactacgagcatgagcccaacacttgccgaagaggtcacgccgcaaaacgacggtagcgtgattatcgatggcaccgccaacgtgcgggaaatcaacaaagcctttaactggcatctaccggaagatgatgcccgcacggttaatggcgtcattcttgaggcactggaagagatccctgtcgcaggcacccgcgtgcgtattggcgagtacgatatcgatattctcgacgtacaggacaatatgattaagcaggtaaaagtttttcctgtgaaaccgctgcgcgagagtgtggcggagtaacgaaaacggcccggcattcgcatgcagggccgtgaattattacgaaagcagaaattaagcttttgctttcgctacagtaaccatcgccgcacgaatcgtacgaccattcagcgtataacccttctgcataatgcccagtacgttacctggcgcaacgtcatcagattccaccattgcgatggcctgatgcacattcgggtccagtgggacgttagtttcggcgatcacttcaacgccaaacttacgcacaacatccagcatgctcttcagcgtcagctcaatgccttcaaccatcgcagacatatccgggttagctttatcagccacttccagcgcacgatccaggctatcaatcaccggcagcaattcgttgatgaatttctccagcgcgaatttgtgggctttttcaatatccagttcagtacgacgacgcaggttttccatttcggcttttacacgcaaaatgccgtcacgttcacgggtctgggcttcagccagctgagcttcgagattcgcaactttttcatcgcgcggatccacctgctcagcagaagcttctggctcaactgcctcaatctcttcgtgctgatccatgataatttcttccggggcttgcccctcaggcgttttctgttctttactactcatgaatttctccgcgtttttttcgcattcatctcgctaacttcgcttattatggggatcagtttcagggtttcaagggaagcactcacattgtcatcaatcttcgcaacaaggacctcggaaaaatgaataatcatttcaagtgtattggcattgtgggacacccacggcaccccactgcactgacaacacatgaaatgctctaccgctggctgtgcacaaaaggttacgaggtcatcgttgagcaacaaatcgctcacgaactgcaactgaagaatgtgaaaactggcacgctcgcggagattgggcaactagctgatctcgcggtagtcgttggtggcgacggtaatatgctgggcgcggcacgcacactcgcccgttacgatattaaagttattggaatcaaccgtggcaacctgggtttcctgactgaccttgaccccgataacgcccagcaacagttagccgatgtgctggaaggccactacatcagcgagaaacgttttttgctggaagcgcaagtctgtcagcaagattgccagaaacgcatcagcaccgcgataaatgaagtggtgcttcatccaggcaaagtggcgcatatgattgagttcgaagtgtatatcgacgagatctttgcgttttctcagcgatctgatggactaattattagcacgccaacaggctccaccgcctattccctctctgcaggcggtcctattctgaccccctctctggatgcgattaccctggtgcccatgttcccgcatacgttgagtgcacgaccactggtcataaacagcagcagcacgatccgtctgcgttttagccatcgccgtaacgacctggaaatcagttgcgacagccagatagcactgccgattcaggaaggtgaagatgtcctgattcgtcgctgtgattaccatctgaatctgattcatccgaaagattacagttatttcaacacattaagcaccaagctcggctggagtaaaaaattattctaattttacgccagcctctttactgtatataaaaccagtttatactgtacacaataacagtaatggtttttcatacaggaaaacgactatgttggcacaactgaccatcagcaactttgctatcgttcgtgagcttgagattgattttcatagcggcatgaccgtaataactggcgagaccggcgcgggtaaatctattgcaatagatgccctcggtctttgtctcggtggtcgcgctgaagccgacatggtgcgtaccggcgctgctcgcgctgacctgtgcgcccgtttttctctgaaagatacgccagcggctctgcgctggctggaagaaaaccagcttgaagacgggcatgaatgtttgcttcgtcgcgtgatcagcagcgatggtcgctcccgtggtttcatcaacggtacagctgttcctctgagtcaactgcgcgaactgggtcagttgctgattcagatccatggtcagcacgctcatcaattactcaccaaacctgagcaccaaaaattcctgcttgatggctatgccaatgaaacctctctactgcaggaaatgaccgcacgttatcagttgtggcatcaaagctgccgtgacctcgcgcatcatcaacagttaagtcaggaacgcgccgcccgtgcggaactgctgcaataccaattaaaagaacttaacgaatttaatccgcagcccggagagtttgaacaaatcgacgaagagtacaaacgtctggcgaacagcggtcaattgctgaccaccagccagaatgcattggcattaatggccgacggtgaagacgcaaacctgcaaagtcagctttacacggctaaacaactggtgagcgaattgattggcatggacagcaaactgtccggcgtacttgatatgctggaagaagctaccatccagattgctgaagccagcgatgaactgcgccactactgcgatcgtctggatctcgatcccaaccgactatttgaacttgaacagcgcatcagtaaacagattagcctggcacgtaaacatcacgtcagccctgaggcattgccacagtattaccagagcctactggaagaacagcagcaactggacgatcaggccgacagtcaagaaacgcttgcgctggcggtaacgaaacatcatcagcaggcactggaaatcgcgcgcgcattacaccaacaacgccagcaatatgcagaagaacttgcacagctgatcaccgacagtatgcatgcgctcagtatgccgcatgggcagtttacgatcgatgttaaatttgacgagcatcacctgggcgctgacggtgccgatcgtattgagtttcgggtaaccaccaacccaggtcagccaatgcagcctattgccaaagtcgcatccggtggtgaattgtcccgcatcgcactggcaatccaggtcatcacggcgcgtaaaatggaaaccccggcactgatttttgatgaagtggatgtagggattagcggtccaacagcggcagttgtcggcaaactgctgcgtcaactcggcgaaagtactcaggtgatgtgtgttacccacctgccacaagtcgcgggatgtggtcatcaacactattttgtcagcaaagaaaccgatggtgcgatgacagaaacgcatatgcaatccctgaataaaaaagcgcggttacaagagctggcgcgcctgcttggtggcagtgaagtcacacgtaatacactggcgaatgcgaaagaactgcttgcagcgtaaacttttttcctgcttcacggtcagagtaaacagcaaaacgccgtaagaccggaaagcaaaaggttttaaagtgatgaaaggtctattatcatcggcatattacagatgagccacgtactgctcgggcccgaaaaggaatcaaatcactatgcgctgtaaaacgctgactgctgcagcagcagtactattgatgttgaccgcaggctgttccactctggagcgagtggtttaccgtcctgacatcaaccaggggaactatctgaccgctaacgacgtatccaaaatacgtgttggcatgacgcaacaacaagttgcgtacgcattgggtacaccgctgatgtccgatccatttggtacgaatacctggttctatgtcttccgccagcaaccaggtcatgaaggtgtaactcagcaaacgctgacgctgacctttaacagtagcggtgtgttgaccaatattgataacaaacctgcgctgagtggtaactaataataaagttgctctcaaagacgttaaaaaaggtgctcaatgagcaccttttttctgtctgttatttattcgcacttttttctgctcgttgcctgcgaagctctttcggatcggcaatgagagggcgataaatctccacccgatcgccatcatgcacactatcgcttagttttgccggacggctgtaaatgccgactttgtttttagttaaatcgatatcggtacgcaattccagcaagccactggcgcgaatagcttcttcaaccgtcgcgccctcctgcagcgtcactcgctgcaggtactgcttctcaggtagcgcataagccacctcaacggcaattttacctggcactgtaaacctctttcgcacgaaccgtaaaagcctggaccatattagccgccagctctttaaacacgcgaccaaaggcgagttcaatcaacttattggtaaactcaaagtcgagatgaaactcgatacgacacgcctcctggctcagcggcgtaaacttccatccaccaatcaatttcttgaacggcccatccaccagattcataagaatactttggttactggtcaactggttgcgggtagtaaacgttttgctgatcccagccttagagacatctaccgccgcagtcatctgcccaggagtggactccagaatccgacttccggtacaacccggcaaaaactgaggataagactgaacgtcattcactaactgatacatttgctccgcgctgtagggtaccagtgcggtccggctaatctgaggcataacaatttccatcaacaaaaatccaacaaataatatcatttatcctgctgtaaaaaaaacgctatcccggcgctgggtaacatcgggttcatgctaagatagagccttgtcccccgcaggattgatatggggtgttttcgatttcagattaccgatgattcacgacgcttatgacgaagaaaaaagcacataaacctggtagtgcgaccatcgcgcttaacaagcgcgcccgtcacgaatactttatcgaagaagagttcgaagcgggacttgccctgcaaggctgggaagttaaatccctgcgcgcaggaaaagccaatatcagcgacagctacgtccttctgcgtgacggagaggcatttctgtttggcgctaacatcacgccaatggccgtggcctccacgcatgtggtgtgcgatcctacccgtacccgcaagttacttctcaaccagcgcgaactggacagtttgtacggtcgcgtcaatcgagaaggctataccgtagtggcgctctccctgtactggaaaaatgcctggtgcaaagtgaaaatcggcgtcgccaaaggtaagaaacagcacgataaacgtagtgatatcaaagagcgcgaatggcaggtggataaagcacgtatcatgaaaaacgcccaccgttaaacctgcactccaattattgaccagttcctcaccgcgcctccctctccggcggcgcgaatgaacatcttattggctatcacatccgacacaaatgttgccatcccattgcttaatcgaataaaaatcaggctacatgggtgctaaatctttaacgataacgccattgaggctggtcatggcgctcataaatctggtatacttacctttacacattggggctgattctggattcgacgggatttgcgaaacccaaggtgcatgccgaggggcggttggcctcgtaaaaagccgcaaaaaatagtcgcaaacgacgaaaactacgctttagcagcttaataacctgcttagagccctctctccctagcctccgctcttaggacggggatcaagagaggtcaaacccaaaagagatcgcgtggaagccctgcctggggttgaagcgttaaaacttaatcaggctagtttgttagtggcgtgtccgtccgcagctggcaagcgaatgtaaagactgactaagcatgtagtaccgaggatgtaggaatttcggacgcgggttcaactcccgccagctccaccaaaattctccatcggtgattaccagagtcatccgatgaagtcctaagagcccgcacggcgcaagccctgcgggcttttttgtgccctcaatttgtcccgcgaagtccgaagagaactaattaaatccgaaccttttaggcccattgataggcccaacgaaaagctctattgtttacgttgggctaaacgcagggagactccccacctttgaaaacaggatgtagcgatgaaacttaacgacagtaacttattccgccagcaggcgttgattaacggggaatggctggacgccaacaatggtgaagccatcgacgtcaccaatccggcgaacggcgacaagctgggtagcgtgccgaaaatgggcgcggatgaaacccgcgccgctatcgacgccgccaaccgcgccctgcccgcctggcgcgcgctcaccgccaaagaacgcgccaccattctgcgcaactggttcaatttgatgatggagcatcaggacgatttagcgcgcctgatgaccctcgaacagggtaaaccactggccgaagcgaaaggcgaaatcagctacgccgcctcctttattgagtggtttgccgaagaaggcaaacgcatttatggcgacaccattcctggtcatcaggccgataaacgcctgattgttatcaagcagccgattggcgtcaccgcggctatcacgccgtggaacttcccggcggcgatgattacccgcaaagccggtccggcgctggcagcaggctgcaccatggtgctgaagcccgccagtcagacgccgttctctgcgctggcgctggcggagctggcgatccgcgcgggcgttccggctggggtatttaacgtggtcaccggtagcgcgggcgcggtcggtaacgaactgaccagtaacccgctggtgcgcaaactgagctttaccggtagcaccgaaattggccgccagttaatggaacagtgcgcgaaagacatcaagaaagtgagcctggagctgggcggtaacgcgccgtttatcgtctttgacgatgccgacctcgacaaagccgtggaaggcgcgctggccagcaaattccgcaacgccgggcaaacctgcgtctgcgccaaccgcctgtatgtgcaggacggcgtgtatgaccgttttgccgaaaaattgcagcaggcagtgagcaaactgcacatcggcgacgggctggataacggcgtcaccatcgggccgctgatcgatgaaaaagcggtagcaaaagtggaagagcatattgccgatgcgctggagaaaggcgcgcgcgtggtttgcggcggtaaagcgcacgaacgcggcggcaacttcttccagccgaccattctggtggacgttccggccaacgccaaagtgagcaaagaagagacgttcggccccctcgccccgctgttccgctttaaagatgaagctgatgtgattgcgcaagccaatgacaccgagtttggccttgccgcctatttctacgcccgtgatttaagccgcgtcttccgcgtgggcgaagcgctggagtacggcatcgtcggcatcaataccggcattatttccaatgaagtggccccgttcggcggcatcaaagccagcggtctgggtcgtgaaggtagcaagtatggcatcgaagattacttagaaatcaaatatatgtgcatcggtctttaactggagaatgcgaatgaacagcaataaagagttaatgcagcgccgcagtcaggcgattccccgtggcgttgggcaaattcacccgattttcgctgaccgcgcggaaaactgccgggtgtgggacgttgaaggccgtgagtatcttgatttcgcgggcgggattgcggtgctcaataccgggcacctgcatccgaaggtggtggccgcggtggaagcgcagttgaaaaaactgagccacacctgcttccaggtgctggcttacgagccgtatctggagctgtgcgagattatgaatcagaaggtgccgggcgatttcgccaagaaaacgctgctggttacgaccggttccgaagcggtggaaaacgcggtaaaaatcgcccgcgccgccaccaaacgtagcggcaccatcgcttttagcggcgcgtatcacgggcgcacgcattacacgctggcgctgaccggcaaggtgaatccgtactctgcgggcatggggctgatgccgggtcatgtttatcgcgcgctttatccttgcccgctgcacggcataagcgaggatgacgctatcgccagcatccaccggatcttcaaaaatgatgccgcgccggaagatatcgccgccatcgtgattgagccggttcagggcgaaggcggtttctacgccagcagcccagcctttatgcagcgtttacgcgctctgtgtgacgagcacgggatcatgctgattgccgatgaagtgcagagcggcgcggggcgtaccggcacgctgtttgcgatggagcagatgggcgttgcgccggatcttaccacctttgcgaaaagcatcgcgggcggcttcccgctggcgggcgtcaccgggcgcgcggaagtaatggatgccgtcgctccaggcggtctgggcggcacctatgcgggtaacccgattgcctgcgtggctgcgctggaagtgttgaaggtgtttgagcaggaaaatctgctgcaaaaagccaacgatctggggcagaagttgaaagacggattgctggcgatagccgaaaaacacccggagatcggcgacgtacgcgggctgggggcgatgatcgccattgagctgtttgaagacggcgatcacaacaagccggacgccaaactcaccgccgagatcgtggctcgcgcccgcgataaaggcctgattcttctctcctgcggcccgtattacaacgtgctgcgcatccttgtaccgctcaccattgaagacgctcagatccgtcagggtctggagatcatcagccagtgttttgatgaggcgaagcagtaacgccgctcctatgccggaggcgacgctgcgcgtcttgtccggcctacggggatccaggtcggataaggcgtttacgccgcatccgacaatctgtacgtgaacaggaagaaatctatgttggccgggtaaggcggagccgctctccggcaaaaagaatcaataacaattatacgcgtgacccggcgcgggaaatgtcggggcgctctcccaagtgacacactttcgagaggattcaggatggggcaaagtagccaaccacatgagttaggcggcgggctgaagagtcgccacgtcaccatgttgtctattgccggtgttatcggcgcaagtctgtttgtcggttccagcgtcgccatcgccgaagcgggcccggcggtattactggcctatctgttcgccgggctactggtggttatgattatgcggatgttggcggaaatggcggttgccacgcccgataccggtagcttttccacctatgccgataaagccattggtcgctgggcgggctataccatcggctggttgtactggtggttttgggtactggttatcccgctggaagccaacatcgccgccatgatcctgcacagttgggttccaggcattcccatctggttattttccctcgtcattaccctcgccttaactggcagtaacttattaagcgttaaaaactacggcgaatttgagttctggctggcgctgtgcaaagtcatcgctatcctggcctttattttccttggtgcagtcgcaattagcggtttttacccgtatgccgaagtgagcgggatcagtagattgtgggatagcggcggctttatgcccaacggtttcggtgcggtattaagcgcgatgttgatcaccatgttcagctttatgggcgcagaaattgtcaccattgccgccgcggaatccgacacgccggaaaaacatattgtccgcgccaccaacagcgttatctggcgtatttctatcttctatttatgttctatttttgtcgtcgtggcattaattccgtggaatatgcccggactaaaagccgtcggttcttatcgcagcgtactggaattgctcaatattccccatgcgaaattaatcatggactgcgtgatattactttccgtaaccagttgcctgaacagcgcgctgtataccgcgagtaggatgctctactccttaagtcgtcgcggtgatgctcccgcggtaatgggtaaaatcaaccgcagtaaaaccccgtacgtggcggtgttactctccaccggcgcggcattcttaacggtggtggtgaactattacgcgcctgcgaaggtatttaaatttctgatcgacagctccggcgctatcgccctgctggtttatttagtcatcgccgttagtcagttgcggatgcgcaaaattctgcgagcagaaggaagcgaaattcgcttgcgaatgtggctttatccgtggctcacctggctagtcatcggctttattacctttgtgttggtagtgatgctattccgtccggcgcaacagttagaagtgatctccaccggcttattagcgatagggattatctgtaccgtgccaattatggctcgctggaaaaagctggtattgtggcaaaaaacacccgttcataatacgcgctgatcatgatcaggagtcacaccatgaccattacgtctctggatggctatcgctggctgaagaacgatattattcgcggtaattttcaaccggatgaaaaattacgaatgagtttgctgacaagccgttatgcacttggcgttgggccgttacgggaagctcttagccaactggtggcggaacggctggtcacggtggtgaatcaaaaagggtatcgggtggcgtctatgagtgagcaggagctgctcgatattttcgacgcccgcgccaatatggaagcgatgttagtgagtctggcgattgcccgcggtggcgatgagtgggaggcagacgttctcgcaaaagcgcatctgctgagtaagcttgaggcctgtgacgccagcgagaaaatgcttgatgagtgggatctgcgtcatcaggcgtttcatacggcaattgtggcgggctgtggttctcactatttgctgcaaatgcgtgaacggttgtttgatctggcggcgcgttatcgatttatctggctgcggcgaacggtgcttagcgtggaaatgctggaggataaacacgatcagcaccagaccctgactgcggcggtactggcgcgagataccgcgcgcgccagtgagttaatgcgccagcatttactgacgccaattcccattatccagcaggcgatggctggcaattaattactcttccggaatacgcaacacttgccccggataaattttatccgggctttttagcatcggtttattcgcttcgaagattttattgtacagattagcgttaccgtagacctgtttggaaatggcactcagagtgtcgccagacttaacggtataaaactggctggcagtggctggtgtcgccgttttcacctgatcatcgacactggcaataccggaaatattccccaccgcaacaaggattttctccttcgcctcctgactcaggccgtcaccagtgaccgtcgctttgccgtcggcaatttgaatattcactttatcggcatccggtataccggttttgttcagatgctcctgcaccttcttcgcctgatcgtctttatcgtgctgacctgtaaccgcgtcccagagtttttctccggcatctttcacaaaattgaacagacccatagctacctcattcgttaacggaaacactcagaaagtgtagcagaggaacgcggcgcgttaacgccgcggggatgagcacaggtttaatcgcgggtttgcacccagaacgcgtgaatcaaaccggggatatacccaagcagtgtcaacagaatattaataatgaacgcccaaccgaaccctttaccgagcagcacgccgagcggcggcagaatgatggtgatgacgattctccagaaacccatatgtactccctataagaaaattactcattgtttaaaaagagattttatctcttaagcgtagtaattttagcggagcctgccagtttcagcttacgcttttactctcatttacgctgctgaggctggtatatgttgcatttttagtttagagtttacttaatttagaaaatacttaaataaatatgactgaactcgcgcaattacaggccagtgccgaacaggcagcggccttattgaaagcaatgagccaccctaaacgattgctgattctgtgcatgcttagcggttcccccggcaccagcgcgggagagctgacgcgcattaccggactgagtgcctctgcgacaagtcagcatctcgctcgtatgcgggacgaagggcttatcgacagccaacgggatgcccaacgcattctatattccattaaaaatgaggcggtaaatgccattatcgccaccctgaaaaatgtctattgtccgtaaggagtcactatggctttgacaaccattagcccgcatgatgcacaagaattaatcgcacgcggcgcaaagttaatcgatattcgtgatgctgatgaatatcttcgtgaacatattcctgaagcagatctggctccattatccgtgctggaacagagtggtcttccggctaaattacgtcacgagcaaattatattccactgccaggcaggtaaacgcaccagtaataatgccgataaattagcagcgattgccgcccccgcagaaatctttttactcgaagatgggattgatggctggaaaaaagcaggattgccagtagcggtaaataaatctcaacccttgccgttaatgcgccaggtgcagatcgctgcgggtggtttaatattaatcggcgttgtactgggttataccgtaaatagcggtttcttcttattaagtggctttgttggtgccgggttactgtttgcaggaatcagcggtttttgtggaatggcaaggttgttagataagatgccgtggaaccaacgagcttgagaagcgacgccggacgcgccctagcagcgacatccggcctcagtaattagatcaggaaatcgtcgagagatttaccttctgccagcgcctgagcaattggcttcggtgtacggccctgaccggtccaggttttagtttcaccgttaacatcggtgaatttatatttcgccggacgcggctggcgttttttaccagcgcgtggtgcagcagcagagctattacccaataactcttccgggttaattccgtcagctttcatcagctccagccaggtgctaattttttcctggcgctctgccagttcacgctgctgctgttcttcttcttcacgtctttctttagtgacaaccctgaatttttcgagcatttcttcaagaacgtcaatggagaattcgcgagccatcgcacggagggtgcgaatgttatttaaactttgtaacattacggacataataaagaaaaccttttaacgccaaaacaaaaaaagtatttcgtcgcgtagtgtaagcgatcacttattatatttccacaaaatttaatctatttacagtcctgcgcgagattatttcagctgttattttctgaaactctcagaataatttcaagattatatattagccattttgatgagtaatttagattattggtgaacagagcggcgctctctgctcgctaattccgcaagcctgacaaaatcaaagtgaataaaaatgcaatataacagaataaaagaaaacatccatcactggtgctttctgctgttaatgtacattgtctggcataaaaaatgctgaaaatgacccagctactacatacaccgaattctctacgcttatagcgttacctcacccccaaactttcattagtgatattaaaggtaaggccatatctaattgatttaattaaaaataaatcatatcggcatgtaaaaatccacaatgtacaaaaaacgagccgttacggaatattttatctacaaaaactgactaaataaaaatttttcactaattgattagtcatagccagcgatatacgctatgcgaaaatgcagatggcaatgagatccactgctttcatctccattaacatcccattacgcttttattaaggagcattagcatgttcagtccgcagagtcgcttgcgtcatgcagttgcagatacgttcgcgatggttgtttactgttctgtcgtgaacatgtgtattgaagttttcctctccggaatgagcttcgaacagtctttttattccagattggtagcgattccggtgaacatcttaattgcatggccatacggtatgtaccgtgatctgtttatgcgcgcggcacgcaaagttagcccgagcggctggataaaaaatctggcggatatcctggcttatgtgacgttccagagtccggtgtatgtggcgatcttgttagtggtgggcgcagactggcatcagattatggcggcggtcagtagtaacatcgttgttagcatgttgatgggggcggtttatggctacttcctcgattattgccgccgactgtttaaagtcagccgttaccagcaggtaaaagcctgactcttcttttcgcgactggcatcgccagtcgcgtctttaactggcttcgccaaataaaccattcaaataacgttcaagcgcaacacggctactaaagccatgcgggataccgtaatgctcgtgtcgctcgcctgctaaatagagcggaaattgctggtaatgatcgcaagttttaatatcggaagcgggttcagccagtgtgctactgcgttcttttaatgttggatgaattaccagagcggtacgtcccattcgcgcttcgcgattaacatagacataattttccccacggcggtaaccatacgctttctgggttaccacatcgacagtaaaaccgactttttcaagtacgcgcgccacctcgtctggtcgtaaatacatatttgatcctcgttattatcaaccgcgggcctaccttacctgattgcgcattcacaacgctttcagaaaagtccataaagccgcgatgaacctcagttaagaaaattatggtctacactgaaaattacatcgaattctaatgggggatcatatgtttaaccgaccgaaccgcaacgacgttgatgatggcgtgcaggatatccagaatgatgtcaatcaattagctgacagcctcgaatctgtattgaagtcctggggcagcgacgccaaaggggaagctgaagccgcacgcagtaaagctcaggcattgctgaaagaaaccagggcgcgaatgcatggtcgtactcgcgtccagcaagccgcgcgcgatgccgttggctgcgcggattcttttgttcgtgaaagaccctggtgtagcgtgggtacagcagctgcggtaggtatttttatcggcgcactgttaagcatgcgcaaaagctaatgcaaaaatgataataaatacgcgtctttgaccccgaagcctgtcttcggggtttctttttgcctggtgaatcacaaaaatccccctaccccgtcacgctcatatccagggtaatttcgaccactatttgctatatattgtgtggttgaatcttttttcaactacatctagtatctctgtatcaacagagagacaacccgacgcgtatcatcgcgccgtatcttcattttaaacggaaatacgaatcatgcgcattactatttacactcgtaacgattgcgttcagtgccacgccaccaaacgggcgatggaaaaccggggctttgattttgaaatgattaatgtcgatcgcgttcctgaagcggcagaagcgttgcgtgctcagggctttcgtcagttgccggtagtgattgctggcgatcttagctggtctggtttccgtccggacatgattaaccgtctgcatccagcgccacacgcggccagtgcatgagccagctcgtctacttctccagcagctccgaaaacacgcagcgttttatcgaacgtttaggtctgcccgcggtgcgcatcccgctcaatgagcgggaacggattcaggtagacgagccttacatcctgatcgtgccctcttacggcggcggcggtacggctggcgcggtgccacgacaggtaattcgctttttaaacgacgagcacaaccgggcgttgcttcgcggcgttattgcttctggtaatcgcaactttggtgaggcgtatggccgcgccggagatgtgattgcccggaaatgcggcgtgccgtggctgtaccgttttgaactcatgggtacgcaaagcgatatcgaaaacgttcgtaaaggagtaaccgaattttggcaacgacaaccgcagaatgcctgacgcaggaaacgatggattaccacgcgctgaatgcgatgcttaacctctacgatagcgcaggtcgcattcagttcgataaagaccgccaggccgttgacgcctttattgcgacgcatgtgcgtccgaacagtgtgaccttcagtagccagcagcagcgcctgaactggctggtcaacgaaggttactatgatgaaagcgttcttaatcgctactctcgcgactttgtcattacgctgtttacccacgcacacaccagcggttttcgtttccagacattcctcggggcatggaagttttacaccagctatacgttgaagacattcgacggtaaacgttatctggaagattttgccgatcgagtaacgatggtggcgctgacgctggcacaaggcgatgagacgctggcgttgcaactgaccgatgaaatgctgagtggacgctttcagccagccacgccaacattcctcaactgcggtaagcagcagcgcggcgaactggtttcctgttttttgctgcgtattgaagacaatatggagagcattggtcgggcggtaaattccgcactgcagctgagcaaacgcggcggcggcgtagcatttttgctgagcaatctgcgagaagcgggcgcgccaattaaacgtattgaaaatcaatcttctggcgtaattccggtgatgaaaatgctggaagacgcattttcctatgccaaccaactcggcgctcgtcagggggctggtgcagtctatttacatgctcatcatcccgatattctgcgttttctcgacacgaaacgggaaaatgccgacgaaaaaatccgcattaaaacactgagccttggcgtggtgatcccggatatcactttccatctggcaaaagagaatgcgcagatggcgctgtttagcccttatgacgtagagcgagtttatggcaagccgtttgccgatgtggccatcagccaacactatgacgaactggttgccgatgaacgcattcgcaaaaaatacctcaacgcccgtgatttcttccagcgactggcagaaatccagtttgagtccggctatccctacatcatgtatgaagacacggtaaaccgtgctaaccctatcgccgggcgcataaatatgagtaatctctgcagtgaaattttgcaggttaacagcgccagtgagtatgacgagaatctcgactatacccgcacaggccatgatatttcctgcaatttaggtagcttgaatattgcgcacaccatggattcccccgattttgcccgcacggtagagactgccgtgcgcggtttaacggcagtaagtgatatgagtcatatccgcagcgtgccgtccatcgaagccggaaatgccgccagccacgccatcggactggggcagatgaatttacacggctatctggcgcgagaaggcatcgcttatggtagcccggaagcactggatttcaccaatctctatttctatgccatcacctggcatgcactgcgtaccagcatgttgctggcacgcgaacgcggtgaaaccttcgccgggttcaaacagagtcgctatgccagtggtgaatattttagccaatatctgcaagggaactggcagccgaaaacggcgaaagttggcgaactgtttacccgtagcggtattacgttacctacccgtgagatgtgggcgcagctgcgcgacgacgtgatgcgctacggcatatacaaccagaatcttcaggcggtgccgccaaccggttctatctcttatatcaaccatgctacgagcagtattcatccgattgtggcgaaagtagagatacgcaaagagggcaaaacaggacgcgtttactaccctgccccgtttatgactaacgagaatctggcgctgtatcaggacgcttacgaaattggcgcagaaaagatcatcgacacctacgcggaagcgactcgccatgtcgatcaggggctgagcctgacgctttttttccccgataccgccaccactcgcgatatcaacaaagcgcagatttacgcctggcgcaagggtatcaaaacgctctattacatccgcctgcgtcagatggcgctggaaggcactgaaattgaaggctgcgtctcctgtgcactttaaggaatatctatgaaactcagtcgtatcagcgccatcaactggaacaagatatctgacgataaagatctggaggtgtggaatcgcctgaccagcaatttctggctaccagaaaaggtgccgctgagcaacgatattcctgcctggcagacattaactgtcgtagaacaacaactgacgatgcgcgtttttactggcctgacgctgctcgacacgctgcaaaatgttatcggcgcgccttctctgatgcccgatgcactcacgcctcatgaagaagcggtattaagcaatatcagctttatggaagcggttcatgcccgctcttacagtagcattttcagcacgctatgccagaccaaagatgtcgatgccgcctacgcctggagtgaagaaaacgcaccgttgcagcgaaaagctcagattattcagcaacattatcgcggtgatgatccgctgaaaaagaaaatcgccagtgtgtttcttgaatcttttttgttctattccggtttctggctgccgatgtatttttccagccgcggaaagctgaccaataccgcggacctgatccgtctgattatccgcgatgaagcagtccacggttactacataggctataaatatcagaaaaacatggaaaagatatctctgggacaacgtgaagagttgaagagtttcgccttcgatttgttgctggaactctacgacaacgagttgcaatacaccgatgagctgtacgccgaaaccccgtgggctgacgatgtgaaagcgtttctctgttacaacgccaataaggctttgatgaatctgggctacgaaccgttatttcccgcagaaatggcggaagtgaatccggcaatcctcgccgcgcttagcccgaatgccgatgaaaatcacgatttcttttccggtagtggctcctcttatgtgatggggaaagcggttgaaacagaagatgaagactggaatttctgagggtgttattttcaaaaatatcactacccgcagcagggaaataattcccgccaaatagctttttatcacgcaaataatttgtggtgatctacactgatactctgttgcattattcgcctgaaaccacaatattcaggcgttttttcgctatctttgacaaaaaatatcaactttctcgatttgctctcagcccttatatcacgggaaattccggcgatttgctcgcatcaatattcatgccacatttgccatcaggggttgcctcagattctcagtatgttagggtagaaaaaagtgactatttccattgggtaatatatcgacatagacaaataaaggaatctttctattgcatggcaattaaattagaaattaaaaatctttataaaatatttggcgagcatccacagcgagcgttcaaatatatcgaacaaggacttagtaaagaacaaattctggaaaaaactgggctaagccttggcgtaaaagacgccagtctggccattgaagaaggcgagatatttgtcatcatgggattatccggcagcggtaaatccacaatggtacgccttctcaatcgcctgattgaacccacccgcgggcaagtgctgattgatggtgtggatattgccaaaatatccgacgccgaactccgtgaggtgcgcagaaaaaagattgcgatggtcttccagtcctttgccttaatgccgcatatgaccgtgctggacaatactgcgttcggtatggaattggccggaattaatgccgaagaacgccgggaaaaagcccttgatgcactgcgtcaggtcgggctggaaaattatgcccacagctacccggatgaactctctggcgggatgcgtcaacgtgtgggattagcccgcgcgttagcgattaatccggatatattattaatggacgaagccttcagcgcgctcgatccattaattcgcaccgagatgcaggatgagctggtaaaattacaggcgaaacatcagcgcaccattgtctttatttcccacgatcttgatgaagccatgcgtattggcgaccgaattgccattatgcaaaatggtgaagtggtacaggtcggcacaccggatgaaattctcaataatccggcgaatgattatgtccgtaccttcttccgtggcgttgatattagtcaggtattcagtgcgaaagatattgcccgccggacaccgaatggcttaattcgtaaaacccctggcttcggcccacgtagcgcactgaaattattgcaggatgaagatcgcgaatatggctacgttatcgaacgcggtaataagtttgtcggcgcagtctccatcgatagccttaaaaccgcgttaacgcagcagcaaggtcttgatgcggcgctgattgatgcgccgttagcagtcgatgcacaaacgcctcttagcgagttgctctctcatgtcggacaggcaccctgtgcggtgcccgtggtcgacgaggaccaacagtatgtcggcatcattagcaaaggaatgctgctgcgcgctttagatcgtgagggggtaaataatggctgatcaaaataatccgtgggataccacgccagcggcggacagtgccgcgcaatccgcagacgcctggggtacaccgacgactgcaccgactgacggcggtggtgctgactggctgaccagtacgcctgcgccaaacgtcgagcattttaatattctcgatccgttccataaaacgctgatcccgctcgacagttgggtcactgaagggatcgactgggtcgttacccatttccgtcccgtcttccagggcgtgcgcgttccggttgattatatcctcaacggtttccagcaattgctgctgggtatgcccgcaccggtggcgattatcgttttcgctctcatcgcctggcagatttccggggtcggaatgggtgtggcgacgctggttagcctgattgccatcggcgcaatcggtgcctggagccaggcaatggtgactctggcgctggtgttaaccgccctgctgttctgtatcgtcatcggtttgccgttggggatatggctggcgagaagtccgcgagcggcgaaaattattcgtccactgcttgatgccatgcagaccacgccagcgtttgtttatctggtgccaatcgtcatgctatttggtatcggtaacgtgccgggcgtggtggtgacgatcatctttgctctgccgccgattatccgtctgaccattctggggattaaccaggttccggcggatctgattgaagccagccgcagtttcggtgccagcccgcgccagatgctgttcaaagttcagttaccgctggcgatgccgaccattatggcgggcgttaaccagacgctgatgctggccctttctatggtggtcatcgccagcatgattgccgtcggcgggttgggtcagatggtacttcgcggtatcggtcgtctggatatggggcttgccaccgttggcggcgtcgggattgtgatcctcgccattatcctcgatcgtctgacgcaggccgttgggcgcgacagtcgcagtcgcggcaaccgtcgctggtacaccactggccctgttggtctgctgacccgcccattcattaagtaactctgcacttgcccggtgacgccgggcattatcaccctgccaaaaaaaggaataacaatgcgacatagcgtactttttgcgacagcgtttgccacgcttatctctacacaaacttttgctgccgatctgccgggcaaaggcattactgttaatccagttcagagcaccatcactgaagaaaccttccagacgctgctggtcagtcgtgcgctggagaaattaggttataccgtcaacaaacccagcgaagtagattacaacgttggctacaccagccttgcttccggcgatgcaaccttcaccgccgtgaactggacgccactgcatgacaacatgtacgaagctgccggtggcgataagaaattttatcgtgaaggggtatttgttaacggcgcggcacagggttacctgatcgataagaaaaccgccgaccagtacaaaatcaccaacatcgcacaactgaaagatccgaagatcgccaaactgttcgataccaacggcgacggaaaagcggatttaaccggttgtaaccctggctggggctgcgaaggtgcgatcaaccaccagcttgccgcgtatgaactgaccaacaccgtgacgcataatcaggggaactacgcagcgatgatggccgacaccatcagtcgctacaaagagggcaaaccggtgttttattacacctggacgccgtactgggtgagtaacgaactgaagccgggcaaagatgtcgtctggttgcaggtgccgttctccgcactgccgggcgataaaaacgccgataccaaactgccgaatggtgcgaattatggcttcccggtcagcaccatgcatatcgttgccaacaaagcctgggccgagaaaaacccggcagcagcgaaactgtttgccattatgcagttgccagtggcagatattaacgcccagaacgccattatgcatgacggcaaagccagtgaaggcgatattcagggacacgttgatggttggatcaaagcccaccagcagcagttcgatggctgggtgaatgaggcgctggcagcgcagaagtaatttttattcgggcggataaggcgtttttgccgcatccgccgttctgtgcacaatgcctgatgcgacgctggcgcgtcttatcatgcctacaaaccacatcgcacatttcaacaatctatctttcatcccatattcatcaacatccgctattattgatttccagcttaatcatcacctgatgaacaaaaataatgactaaacctaatcatgagcttagcccggcgctgatcgtgctgatgtctatcgccaccggtctggcggtagccagtaactattacgcccagccattgctcgacaccatcgcgcgtaacttttccctttccgccagtagcgcaggctttattgttaccgccgcgcagttgggctatgccgcaggtctactgtttcttgttcccctcggtgatatgtttgaacgccgccgcctgattgtcagcatgaccttactggcggcatgttgattaccgccagcagtcagtcgctggcgatgatgatcctcggtacggcattaaccggtttattcagtgtcgtggcacaaattctggttccgctggcagcgacgctggctagtccggataaacgcggcaaagtggttggcactattatgagcggtctgctgttggggatcttgctggcacggacagttgccggattgctggcgaatctcggcggctggcgcaccgtcttttgggttgctagcgtgttaatggcactgatggcgctggcattatggcgtggtctgccacaaatgaaaagtgaaacccacctcaactacccacagttgttgggttccgttttcagtatgtttatcagcgataaaattctgcgtacccgcgcgttgctgggctgcctgacctttgccaatttcagcattctctggaccagtatggcctttttgcttgccgctccaccttttaactacagcgatggtgtcattggtctgtttggacttgcgggagctgccggagcgttgggcgctcgtccggcgggcggttttgccgataagggcaaaagccaccacaccacaactttcggtctgctgctgctattacttagttggctggcgatctggtttggtcacacttccgtactggcgttgattatcggaatcctggtgctggatctcaccgtgcagggcgtgcatatcactaaccagacggtaatttatcggatacatcctgatgcgcgcaatcgcctgaccgcaggttacatgactagctactttattggcggtgccgccggtagcctaattagtgccagtgcctggcaacatggcggttgggctggcgtttgtctggctggcgcgacgattgccctggttaacttactggtctggtggcgaggttttcatcgtcaggaagccgcaaattaagcaatcagcaaccgttttcgtggctttacacttataagggtgttaagaagcccatcagtctgataaggttaagatattcattcagtctatttataatattaacaatcgttaagcgtacactctatggaaagccctactccacagcctgctcctggtagcgcgaccttcatggaaggatgcaaagacagtttaccgattgttattagttatattccggtggcctttgcgttcggtctgaatgcgacccgtctgggattctctcctctcgaaagcgtttttttctcctgcatcatttatgcaggcgcgagccagttcgtcattaccgcgatgctggcagccgggagtagtttgtggattgctgcactgaccgtcatggcaatggatgttcgccatgtgttgtatggcccgagtctgcgtagccgtattattcagcgtctgcaaaaaagcaaaaccgccctgtgggcgtttggcctgacggatgaggtttttgccgccgcaaccgcaaaactggtacgcaataatcgccgctggagcgagaactggatgatcggcattgccttcagtagttggagtagctgggtatttggtacggtaataggggcattctccggcagcggcttgctgcaaggttatcccgccgttgaagctgcattaggttttatgcttccggcactctttatgagtttcctgctcgcctctttccagcgcaaacaatctctttgcgttaccgcagcgttagttggtgcccttgcaggcgtaacgctattttctattcccgtcgccattctggcaggcattgtctgtggctgcctcactgcgttaatccaggcattctggcaaggagcgcccgatgagctatgaggttctgctgcttgggttactagttggcgtggcgaattattgcttccgctatttgccgctgcgcctgcgtgtgggtaatgcccgcccaaccaaacgtggcgcggtaggtattttgctcgacaccattggcatcgccagcatatgcgctctgctggttgtctctaccgcaccagaagtgatgcacgatacacgccgtttcgtgcccacgctggtcggcttcgcggtactgggtgccagtttctataaaacacgcagcattatcatcccaacactgcttagtgcgctggcctatgggctcgcctggaaagtgatggcgattatataacccacaagaatcatttttctaaaacaatacatttactttatttgtcactgtcgttactatatcggctgaaattaatgaggtcatacccaaatggatagtagctttacgcccattgaacaaatgctaaaatttcgcgccagccgccacgaagattttccttatcaggagatccttctgactcgtctttgcatgcacatgcaaagcaagctgctggagaaccgcaataaaatgctgaaggctcaggggattaacgagacgttgtttatggcgttgattacgctggagtctcaggaaaaccacagtattcagccttctgaattaagttgtgctcttggaagttcccgtaccaacgcgacgcgtattgccgatgaactggaaaaacgcggttggatcgaacgtcgtgaaagcgataacgatcgccgctgcctgcatctgcaattaacggaaaaaggtcacgagtttttgcgcgaggttttaccaccgcagcataactgcctgcatcaactctggtccgcgctcagcacaacagaaaaagatcagctcgagcaaatcacccgcaaattgctctcccgtctcgaccagatggaacaagacggtgtggttctcgaagcgatgagctaacgcgtcatctcgctcaaaaatccagatttataaaagaaaaaatgactggccagcatcgcaacatgctggcctttttggcaagcaggtcggctcagccgatgagttaagaagatcgtggagaacaatatgagcgcaaatgcggagactcaaaccccgcagcaaccggtaaagaagagcggcaaacgtaagcgtctgctcctccttctcaccttgctctttataattattgccgtagcgatagggatttattggtttttggtactgcgtcacttcgaagaaaccgatgacgcatacgtggcagggaatcaaattcaaattatgtctcaggtgtctggcagcgtgacgaaagtctgggccgataacaccgattttgtaaaagaaggcgacgtgctggtcactctcgacccgacagatgctcgccaggcgtttgaaaaagccaaaactgcactggcttccagcgttcgccaaacccaccagctgatgattaacagcaagcagttgcaggcgaatattgaggtgcagaaaatcgccctcgcgaaagcacaaagcgactacaaccgccgtgtgccgctgggcaatgccaacctgattggtcgcgaagagctgcaacacgcccgcgacgccgtcaccagtgcccaggcgcaactggacgtcgcgattcaacaatacaatgccaatcaggcgatgattctggggactaaactggaagatcagccagccgtgcaacaggctgccaccgaagtacgtaacgcctggctggcgctggagcgtactcgtattatcagtccgatgaccggttatgtctcccgccgcgcggtacagcctggggcgcaaattagcccaacgacgccgctgatggcggtcgttccagccaccaatatgtgggtggatgccaactttaaagagacgcagattgccaatatgcgtatcggtcagccggtcactatcaccacggatatttacggcgatgatgtgaaatacaccggtaaagtggttggtctggatatgggcacaggtagcgcgttcagtctgcttccagcgcaaaatgcgaccggtaactggatcaaagtcgttcagcgtctgcctgtgcgtatcgaactggaccagaaacagctggagcaatatccgctgcgtatcggtttgtccacgctggtgagcgtcaataccactaaccgtgacggtcaggtactggcaaataaagtacgttccactccggtagcggtaagcaccgcgcgtgaaatcagcctggcacctgtcaataaactgatcgacgatatcgtaaaagctaacgctggctaatccagaggtgcgtgtgatgcaacagcaaaaaccgctggaaggcgcgcaactggtcattatgacgattgcgctgagtctggcgacattcatgcaggtgctggactccaccattgctaacgtggcgatccccactatcgccgggaatctgggcagtagcctcagccagggaacgtgggtaatcacttctttcggggtggcgaatgccatcagcatcccgcttaccggctggctggcaaagcgcgtcggggaagtgaaactgttcctttggtccaccatcgcctttgctattgcgagctgggcgtgtggtgtctccagcagcctgaatatgctgatcttcttccgcgtgattcaggggattgtcgccgggccgttgatcccgcttagccaaagtctattgctgaataactacccgccagccaaacgcagcatcgcgctggcgttgtggagcatgacggtgattgtcgcgccaatttgcggcccgatcctcggcggttatatcagcgataattaccactggggctggatattcttcatcaacgtgccgattggcgtggcggtggtgttgatgacactgcaaactctgcgcggacgtgaaacccgcaccgaacggcggcggattgatgccgtggggctggcactgctggttattggtatcggcagcctgcagattatgctcgaccgcggtaaagagctggactggtttagtagtcaggaaattatcatccttaccgtggtggcggtggtggctatctgcttcctgattgtctgggagctgaccgacgataacccgatagtcgatctgagcttgtttaagagccgcaacttcaccatcggctgcttgtgtatcagcctcgcgtatatgctctacttcggcgctattgttctgctgccgcagttgttgcaggaggtctacggttacacggcgacctgggcaggtttggcctctgcgccggtagggattattccggtgatcctgagcccgattatcggccgcttcgcgcataaactggatatgcggcggctggtaaccttcagctttattatgtatgccgtctgcttctactggcgtgcctatacctttgaaccaggtatggattttggcgcgagcgcctggccgcagtttatccaggggtttgcggtggcctgcttctttatgccgctgaccaccattacgctgtctggtttgccaccggaacgactggcggcggcaagcagcctctctaactttacgcgaacgctggcggggtctatcggcacgagcataaccacgaccatgtggaccaaccgcgagagcatgcaccatgcgcagttgactgagagcgtaaacccgttcaacccgaatgcccaggcgatgtacagtcaactggaagggcttgggatgacgcaacagcaggcaagtggctggattgcccagcagatcaccaatcaggggctgattatttccgccaatgagatcttctggatgagtgccgggatattcctcgtcctgctggggctggtgtggtttgctaaaccgccatttggcgcaggtggcggcggaggcggtgcgcactaagtacaactaagccagttcatttgaactggcttttttcaattaattgtgaagatagtttactgattagatgtgcagttcctgcaacttctctttcggcagtgccagttcttcgttgctgttgatgcgtacgtcacgttccagaatgctacgcgcaatatcctgcgcttcctgcaagctgtgcatctggtaagtgccacactggtagacgttcagttccgggatctgattctgatcctgcactttcagcacgtcttccattgccgctttccaggcatcagcaacacgctgctcatctggcgtaccaatcagactcatataaaaaccggtgcggcagcccattgggctgatatcgataatctctacaccattaccgttaagatggttacgcataaaaccagcaaacaggtgctccagggtatggatccctctttctggcatcacttctttgttcggcacgcagaagcgcagatcgaacacggtgattgcgtcgccatgcggggtgttcattgttttcgccacccgaactgcaggcgcttccatccgggtatgatcgactgtgaagctatctaacaacggcatttagccacctccggtaatttttttaaaaattttctgaactctttcttcccaggcgagtctgagtatatgaaagacgcgcatttgttatcatcatccctgaattcagagatgaaattttggccactcacgagtggcctttttcttttctgtcaggcgtgtttttccagccacaccgcaaacggttcggtatcagcggcttccatttcctgctgacggcgttcagacgcctcgcgctcggctacaaaatcctcttcgcgcagaatttccagcggctcttcacgcagcagattacggtaggcttctgcaaatgctttgcctgttccgccaataccagtatcaatcatagaccttaagatacgggcagagaaagtcagatcgggattatcgaagcaggcaaccagttcatcacacactttctgatacgcttcgccgccgttaatactatccagcgtttgcgcgacgcgtttcagatcgcggaacagatctttacccacctgcggtaacgggaactgtgcggtttcgcagccgatacccagcgtcagacccggtttgcgaccttcgaggatcacccggttccagttaacgcgtgtacaggcaagttcgctactgctcatttccggtgcatcagccagcgcacaccagaccataaacaggtcgaggaatcgcacctgctgttcatctacaccaatcgggctgaacgggttgatgtccaggctacgcacttcaatatattcaatgccgccacgtaacagcgcatcagaagggctctcgccgctgcgggtaacgcgttttggacgaatcggcgcgtacagttcgttttcaatctgcaacacgttgctgttgatttgcagcctcttaccgtctttctcaataccaatcttcgcgtactcttcgcttggcgttttgattgcctgtttaaggcccgctacgtactcgtaaagatcgttgaaggtaataccaagattgctttggcttttattggtatagccgagatcgctcaaacgaagagaggtcgcatacggcaggtaatacataccgcactcggttttctcaaacggcaggctcgttggttttccttgcaggaaagaagaacaaatcgccggagatgcaccaaacagataaggaatgacccaaccgaaacgatagtaattgcggataacgcggaaatagcccgcagaaattttctctttggcatcagcgccgctgatatcaccgcacttcgcttgccagaatgccattggcaaagagaaattgtagtgcacgccggaaatggtttgcatcagcgcgccgtagcgatttttcagcccttcacgatacagcgttttaaagcgtccggtgttagaagtgccgtactgtgccagttcgatgtcctgaccttctgcgatgtagcatggcatacttaacggccacatccgctcatcgcccatattgcgcgccgtataacgatgcagatcgcgcataaaggtcagcatatgttcaatatcaccatccactggtgtaatgaattccagcaatgcttccgcaaaatcggtagtaatccatttgtgcgtcagtgcggaacctaatgcttcaggatgacctgttgttgccagtgtgccatcagcattaacacgcaaagtttcgcgctccagcccacgctgtatcccctttaacgcctgaggatgtttttccagccaggccagcgcctgacttacgtccgggatcaaattgacctcccgcctgtcaaaatcgttttaattagcataactgtaatggtgaccatatgtgcaggcctacaattagtgccaccacatcatgccctgaacggtcgctgctgcaactgcaacatagcgtaacgctttaccaaggcacaaaaaaaagattaccggtccccagctgatgcgcatccatcccgctaacagacacagtaaatcgccaaccacgggcatccagcttaataatagcgtgactgcaccatagcgtttcagccagccggtagctttctcttgccagcggcttgttttacgcaatggaaagaaacgcccaaggataacgttagttaaccctccaaggctattacccattgttgctgttaaaactaaaacccagggatgactgatcccggaaagcaacattgccaccagcacgacttcggagttgccgggtaatagtgtagcgctgagaaaactactggcaaacaagctgaaaaggcttaacgcttcactcacagcaagcgaacatccacggcgtccatgcctgctgcacgggccgcctgaataccgaaatcggcatcttcaaagaccacacactgcgtcggttgcacgcccatacgctgcgcgcacaacaaaaatgtgtctggcgcgggtttatggtgtttgacgtgatcggcagcgacgacggcgtcaaaataatggcgtaatcccaggtgcgccagcaatgcctcagcgatggcgctttcactccccgttcctacagccattgggcgacgaccatgccaacttttcaccacatcaacaagaggaagcggttcgacgctatccagcagcatacttcttactgcttctgttttttcacgcgctaacgcatgcgggtcgagatcggcctgattcagctcaataattgcctgagcaatacgccaggtggggcttccattaagcgcaatcatcgcctgaatatcgtactgaagaccgtagtgccctaatacttcgcgccacgctttacggtgcgtaggctccgtatccaggattgtgccatccatatcaaaaattaaacctgcataacgctcgtacatggtcttctcgcaagtcgaaaaatatgacgctactttagcgtaattgcttgattttgtcgctgatggcgaaggagaagaaaattcaggaaatggataaaggagttatttagaaatgagatatttttgaaggaaattttttggagaagatggtgcatccgggaggatgactcactgacgttcgcccttcgggccgttgctggcgcaacgttatccttcctggtgcctgcggttaataccgctatctcttcgataccttcattgctgaaggttacggagaatatggtgcatccgggaggattcgaacctccgaccgctcggttcgtagccgagtactctatccagctgagctacggatgcatcgggaaaacttattctactgctgatattgataccgctactaaagccatatcaattaagagatggtgcatccgggaggattactcgccttgcggctcgcccttcgggccgttgctaaagcaacgttatcatccctagtgcctgcggttaattccgctacctcttcgataccttcattgctgaagatttcggagaatatggtgcatccgggaggattcgaacctccgaccgctcggttcgtagccgagtactctatccagctgagctacggatgcatcgggaaatttattttactgctgatattgataccgctactaaagccatatcaagtaagagatggtgcatccgggaggattcgaacctccgaccgctcggttcgtagccgagtactctatccagctgagctacggatgcatcgggaaacttactttactgcagattttttgataccgctactaaagccgtatcaagtaagagatggtgcatccgggaggattactcgccttgcggctcgcccttcgggccgttgctaaagcaacgttatcctccctggtgcctgcggttattaccgccacctcttccataccttcatcgctgaaagtacgtagaatatggtgcatccgggaggattcgaacctccgaccgctcggttcgtagccgagtactctatccagctgagctacggatgcaaatggcggtgaggcggggattcgaaccccggatgcagcttttgaccgcatactcccttagcaggggagcgccttcagcctctcggccacctcaccacacgcctcttacgagtgcttcgaagaacttgtttatcgctcatcgtcgctgcgtggcgcacatattactttctgagacttataagtcaaacaatttttcctacacttttatcgtttgcacacttcacgttcaattagtctgtaaaaacgtcaaaaagagtgttttatcaacagaagaatggaggtctgacagatagtagtaatgcaaaaaaatggagacttaagttgaatgaacgggagtaaagcgaaaagactatagagtgaaggagaaattttgagggtgcgtctcaccgataaagatgagacgcggaaagattagtaactggactgctgggatttttcagcctggatacgctggtagatctcttcacggtgaacagaaacttccttcggggcatttacgccaatacgtacctggttgccctttacccctaaaactgtcacggtgacctcatccccaatcatgagggtctcaccaactcgacgagtcagaatcagcattctttgctccttgaaagattaaaagagtcgggtctctctgtatcccggcattatccatcatataacgccaaaaagtaagcaatgacaaacacattacatctaagcagtcatggcattacattctgttaaacctaagtttagccgatatacacaacttcaacctgactttatcgttgtcgatagcgttaatgcgaatgccgtgaagcgagtccacggcattgcctgacgcttatattattgcaatttcgcgctgacccagcctttcacactggctaacgctgcaggtaaggccgcagcatccgtaccaccggcttgcgccatgtcaggacgtccaccacccttgccgcccacctgctgagcgaccataccaatcagttcccctgctttcacacgatctgtgacgtccttagatacgcctgcaatcagagaaaccttaccttcgactaccgttgccagcacgataattgtgctccccagctgattttttaaatcgtcaaccatggtacgcaacattttcggctcaacaccgctaagctcgctaaccaacagcttaacaccattaacatcaattgccttactggaaagatttgcgctctcctgtgcggcagcttgttctttaagctgttgtaactctttttccagctgacgcgtacgttccagtacactgcgcactttatcagccagattattgctatcgcctttcagcagatgcgcgacttcgcttaagcgatcgctgtctgcatgaacggtggcgatagcaccttctccggttaccgcttcgatacgacgaacgcctgcagcagtaccgctttcagagatgatgcggaacagaccaatatcaccagtgcggctggcgtgagtaccgccacacaactcggtagagaaatcgcccatgctcagcacgcgtacgcgctcatcatacttctcgccgaacagcgccatcgcacctttcgctttcgccgcttcgagatccatgatgttggtttcgatcggcaaattgcgacgaatctgtgtgttcaccaggtcttcgaccgcacgaatctcttctggtttcatcgcttcgttgtgactgaagtcgaagcgcagcaccttgtcgttaaccagactacctttctggcttacatgagtacccagaacctggcgcagcgcagcgtgcatcaggtgcgttgcggagtgattcagacgaatacgggcgcgacgagcctcatcaacatcagcctgcaccgcgtcgcccactttcagagaacccgcagcaagtttaccgatgtgaccaatcgcctggccgtatttctgcgtatcttccaccgcaaaggagaagttagcgcctttcagttcgcctttatcgccaacctgaccgccggattccgcatagaatggcgtttgatccagcacgaccacagcttcctggcctgcattgatggcatcaaccgctttaccatcaacaaacagcgcagtcactttgccgttcagttccagatggtcatagcctttaaattcagatgcactgtcaacacggatcattgcgttgtaatcggcaccaaagccgctggcttcgcgcgcgcgacgacgctgctcttccattgcagcttcaaaaccagcttcgtcaactttgatgttgcgctcacgacaaacatcagccgtcaggtcaaccgggaagccataggtgtcgtacagacggaaagcagtttcaccatccagcgtatcaccagaaagttttgccagctcttcatccagcaacgccagaccgcgctccagagtacgagcaaactgctcttcttcagtcttcagcacctgctcaacctgcgcctgctggcgtttcaggtcttcacccgcagagcccataacgtcgatcagcggaccaaccagtttgtagaagaaggtttctttcgcgccgagcatattaccgtgacgcactgcgcgacgaatgatacgacgcagtacataaccacggttttcattggacggcattacgccatccgcgatcaggaacgcacaagaacgaatgtggtcagcgattacgcgcaggcttttattgctcagatcggttgcgccagtgactttcgctaccgcctggatcagcgtgcggaacaggtcgatgtcatagttagagttaacgtgttgcagcaccgcagcaatacgctccagacccataccggtatctacagacggcttcggcagcggttccatcgtgccatcggcctggcggttgaactgcatgaagacgatgttccagatctcaatgtagcggtcgccgtcttcttccgggcttcccggagggcccccccaaatgtggtcgccgtgatcgtagaagatttcggtgcacgggccgcacggaccagtgtcacccatctgccagaagttgtcagatgcgtatggcgcacctttgttatcgccgatgcgaataatacgttcgcgcgggatccctacttctttttcccagatttcgtaggcttcgtcgtcgctttcatagacggtaacccacagacgctctttcggcagggcaaaccatttttcgctggtcagcagttcccatgcaaactgaatggcatcgtgtttgaaatagtcgccgaagctgaagttgcccagcatttcgaagaaggtatggtgacgcgcggtgtaaccgacgttttccaggtcgttgtgtttaccacccgcacgcacgcagcgttgggaagtggtagcgcgggaataattacgcttgtcgagcccaaggaacacatccttgaactggttcatcccggcgttggtaaacaacaaagttgggtcgttatggggtaccagggagctgctggcaactacctgatgtcccttactatggaaaaagtcgagaaacgcctgacggatctcagcggtgctcttgctcataattatcctgaaatcaagctaacgaaatatcgccaccagctccagcgtgtcttaaccgccgggctggtaactgaaaagtgggaataagataagttttcttgactgggaagtaaaataccgtatgcgttcagtcggcaaaatttcgccaaatctcctggatatcttccatcagatagccacgatagagcagaaaacgctggatcttaactttttcactaaagacagttggcaaaggttcgccatattttcgcgtcgcctgatcgcgcgccagtgcgcaccagtcgatgtcacattcacgcatcgctttttctgtcgcttcgcgggaaatacctttctgattcagttcctggcgaatacgcgcaggtccataacctttgcggctacggctggcgataaagcgcgcaacaaatcggctgtcatcgagatagccatgttcatggcaccaggcaataacgcgctcgtaatcttctgccgtagcatcaatctcttctgggccatttttgcccataatcggtgccgcgagtttacgtcgcagttcttgctcactgtgatcgcgcaccgccagaatgcgtaccgcacgatccaacaggcgagcatatgccgggcgacgggatgtactttctgtcatggcatatccttacaacttaaaaaagcaaaagggccgcagatgcgacccttgtgtatcaaacaagacgattaaaaatcttcgttagtttctgctacgccttcgctatcatctacagagaaatccggcgtactgttcgggttgctcagcagcaactcacgtactttcttctcgatctctttcgcggtttccgggttatctttcagccaggcagtcgcattcgctttaccctgaccgatcttctcacctttgtagctgtaccacgcgcctgctttctcgatcagcttctcttttacgcccaggtcaaccagttcgccgtagaagttgataccttcgccgtagaggatctggaattcagcctgtttaaacggcgcagcgattttgttcttcaccactttcacgcgggtttcgctacccaccacgttttcgccctctttcaccgcgccgatacgacggatgtcgagacgaacagaggcgtagaatttcagcgcgttaccaccggtagtggtttccgggttaccgaacatcacaccaattttcatacggatctggttgatgaagatcagcagcgtgttggactgcttcaggttacccgccagcttacgcatcgcctggctcatcatacgtgccgcaaggcccatgtgagagtcgccgatttcgccttcgatttccgctttcggcgtcagtgccgccacggagtcaacgacgataacgtctactgcgccagaacgcgccagggcgtcacagatttccagtgcctgctcgccggtgtccggctgggagcacagcaggttgtcgatatcgacgcccagtttacgtgcgtagattgggtccagcgcgtgttcagcatcgataaacgcacaggttttaccttcacgctgcgctgcggcgatcacctgcagcgtcagcgtggttttaccggaagattccggtccgtagatttcgacgatacggcccatcggcagaccacctgccccaagcgcgatatccagactaaggctaccggtagagatggtttccacatccatggaacggtcttcacccaggcgcatgatggagcctttaccaaattgtttctcaatctggcccagtgctgccgccaacgctttctgtttgttttcgtcgatagccatttttactcctgtcatgccgggtaataccggatagtcaatatgttctgttgaagcaattatactgtatgctcatacagtatcaagtgttttgtagaaattgttgccacaaggtctgcaatgcatacgcagtagcctgacgacgcaccgcatcacggtcgccgctgaagcattcccgccgggtaatgccttcaccgcgggcagtggcaaaagcaaaccagacggtgccgacaggcttctcttcactgccgccatccggcccggcgataccactaatagacacggcataatcagcacgagccgctttcagtgcgcctatcgccatttccaccacgacgggttcactcaccgcgccatgctgcgccagcgtctcttcgcgtacgccgatcatctgcgctttggcttcgttactgtaggtgacaaatccgcgttcaaaccaggcggagctaccggcaatatcggtaatcactttcgctacccaaccaccggtacaagactcggcagttgttacggttgcgccacgggctttcagcgcctgcccaacctgttcacttaactgcatcagttcactgtcagtcatcacaacctctgtcagtcaaaaatttatgccggacaagatagcactttcgtcaggaagatggtgttggcgttgcaattttacgaggaggattcagaaaaaagctgattagccagagggaagctcacgcccccctcttgtaaatagttactgtactcgcgccagcgccacggcttgtcctaactgccagaccgccattgcgtaatgggtgctgtggttgtaacgggtgatggtgtagaagttcggcagaccgtaccagtactggtagccggtgccaacatccagacgcagcaggctggcttgttgatggttgcccagcggctgctgtggcgttaaacctgcggcggcaagctggctaatgctgtacttagttttgaagccatttggcaagcctggagcctgaccgtttgccattaccgcgacctgatcgcctttcacccagccgtgcgctttgaaatagttcgccacgctaccgatcgcatcaaccggatcccacaggttgatatgcccgtcgccgctgaaatctaccgcatattgtttgtaagagctcggcataaactgtccgtagcccatcgccccggcaaaggaacctttcagattgagcggatcgtcctgctcgtcgcgcgccatcaacaggaaggtttccagctcgccagagaaatactccgcgcggcgtgggtagttaaaactcagcgttgccagcgcatcgaggatgcgagttttccccatcacgcgcccccagcgggtttcaacgccgataatcccgacgataatttccggcggtactccatacacctgccacgcgcgattcaacgcatcttcatactgattccagaaaaccacaccgttctgcacgttgtccggcgtaataaattttttgcgataacggagccatgcgccgttcggaccacttggcggtttcacgcttgtggttggtgcctggttatccatcagccgcagtacgctatccagacgcttcgcctgggagagaatttcctgcaactgctgacgatcgaaaccgtgtttgttcaccattttgtcgatgaactgctgggcattcgggttattagcgaaatcgccgcccatctgcatcacattgtgctgcggctcaagcaggaagccgccagacggcgttccggtggtcgtatcagtctcagtaggttttggcttgctgctacaggcggcaagcaacacaaaaaggggaagcaatgttacataacgacgcttgaacatgaggggtccatttaacagattcaaccaggggcaagtatggtaaagcatcacgccccgcacaaggaagcggtagtcactgcccgatacggactttacataactcaactcattcccctcgctatccttttattcaaactttcaaattaaaatatttatctttcattttgcgatcaaaataacacttttaaatctttcaatctgattagattaggttgccgtttggtaataaaacaataaatcctgaaggagagaacaatgatagaaaccattactcatggtgcagagtggtttatcgggctgttccaaaagggcggagaggtgtttaccgggatggtgaccggcattcttccgctgttgattagcctgctggttatcatgaacgcactgattaattttatcggtcagcatcgtattgaacgttttgctcaacgttgcgccggtaaccctgtttcccgttacctactgttaccgtgcattggcacgtttgtcttttgcaatccgatgaccctaagcctgggtcgctttatgccggaaaagtacaaacccagctactacgcggcggcctcttatagctgccacagtatgaatggcctcttcccccatatcaaccctggcgaactgtttgtttatcttggcattgccagcggtctgacaacgctgaacctgccacttggcccactggcggtgagttatctgctggttggtctggtcaccaatttcttccgcggctgggtgaccgatctgaccaccgccatttttgagaaaaagatgggcattcaacttgaacaaaaagttcacctggcaggagcaacaagttgaaataacacctggcaggagcaacatcatgacgcatattcggatcgaaaaaggaacgggtggctggggcggcccgcttgagctgaaagccacgccgggaaaaaaaatcgtctatatcaccgccggtacccggcctgcgattgttgacaaactggcacagcttactggctggcaggctattgacggatttaaagaaggtgaacccgcggaggcggaaattggtgtcgcggtaatcgactgtggcggcacattacgctgcggcatctatccgaaacgacgtattcccaccattaatatccacagcacgggcaagtccggtccgctggcgcagtacattgtggaagatatttatgtctctggcgtaaaagaagaaaacatcactgtagtaggtgatgcgacaccacaaccctcttccgtgggccgtgactatgacaccagtaagaaaatcaccgaacaaagcgatggtttactggcgaaggtgggaatgggcatggggtccaccgttgcggtgctgtttcaatctggtcgtgacaccatcgacactgtattaaaaaccattctgccgtttatggcattcgtcagcgcgctcattggcatcattatggcttctggccttggtgactggattgcccacggtcttgctccgctggcgagccatccactgggtctggtcatgctggcgctcatctgttccttcccactgcttagtcctttcctcggcccaggcgcagttatcgcacaggttatcggcgtattgattggcgtgcagattggtctcggcaatattccgccgcatctggctttaccggcactgtttgccatcaacgcgcaggcggcctgcgacttcatcccggtcggtttgagcctggcggaagcccgtcaggacacggttcgcgtcggtgtcccttctgtactggtgagccgctttttaaccggcgcgccgactgtactgatcgcctggtttgtctccggttttatctatcaataaaggctgaaacatgaccgttatttatcagaccaccatcacccgtatcggcgcgagtgccattgacgccctcagtgaccagatgctcatcacctttcgtgaaggcgcgcctgcggacctcgaagagtattgcttcattcattgccacggcgagttgaaaggtgcactccatcccggtttgcaatttagtctcgggcagcatcgctatccggtgaccgctgttggcagcgtggcggaagacaaccttcgcgaactgggtcatgtcaccctgcgcttcgatggtttaaacgaagcggaatttccgggcactgtccatgtggcaggccctgtccccgacgatatcgcgccgggaagcgttttgaagtttgaatctgttaaggagtaaaaaatgaatcaggttgccgttgtcatcggtggtgggcaaaccttaggcgcgttcctgtgccacggtctggctgccgaggggtatcgcgtcgcggttgtcgatattcagagcgacaaagccgcaaatgtggcacaagaaattaacgccgaatatggtgaaagtatggcgtacggttttggtgctgacgccactagcgagcaaagcgttctggcgctctctcgtggggtagatgaaatctttggtcgcgtggatttgctggtctacagcgccggaatagcaaaagcagcctttatcagcgacttccagctcggcgattttgaccgtagcctacaggtgaatctggtgggttatttcctgtgtgcgcgtgaatttagccgtttgatgatccgcgacgggattcaggggcgcattattcagatcaacagcaaatccggcaaagtgggcagcaaacacaactctggctacagcgcagcgaaatttggtggcgtcgggctgactcaaagtctggcgctggatctggcggagtacggcattacggtgcatagtctgatgctcggtaacctgctgaaaagcccgatgttccagagtctgttgccacaatacgcgaccaagctgggtatcaaaccggatcaagtcgagcagtattacatcgacaaagtaccgctcaaacgcggctgcgattatcaagatgtgctgaatatgctgctgttctacgccagtcctaaggcgagctactgcaccggacagagcatcaatgtcaccggcggtcaggtgatgttctgatcaacagcggagatccattaaggatctccgtgagactatagaatgcctgatgcgctacgctcatcaggcatacaggacttccgccactacattaaggaaaagttatggtatccgcactcatcaccgtcgccgttatcgcctggtgtgcgcaactggccttaggcggctggcaaatttctcgttttaaccgtgccttcgacacactatgccagcaagggcgggttggcgtgggccgttccagcgggcgctttaaaccgcgggtcgtggtcgccatcgcgctggacgatcagcagcgcatcgtcgacaccttgtttatgaaaggactgaccgtcttcgcccgaccgcaaaaaattcccgcaattaccggtatgcatgcgggtgatttacagcccgatgtgatctttccccatgatccactaagtcagaatgctctaagtttggcgcttaaactgaaacgtggataatttcgttgtgaatgttacttgcttgcgaagttatcattttgaaacctaaatcaggtaatcacgcccatgaaacctcgtcagcgtcaggccgccattctggagtatctgcaaaagcagggtaaatgcagcgttgaagaattggcgcaatactttgacaccacaggcacaaccattcgcaaagatctggtcattctggaacatgccggaaccgtcattcgtacttatggcggagtggtgttgaataaagaggaatccgatccgcctatcgatcataaaacactcatcaacacccacaagaaagagctgattgcagaagctgccgttagttttatccatgatggcgatagcatcattcttgatgctggcagtaccgttttgcagatggttcccctgctcagccgctttaataacatcacggtgatgaccaacagcctgcatatcgtcaatgcgctatccgaactggataacgaacaaactatcctgatgccaggcggaacgtttcgcaaaaaaagcgccagttttcacgggcaactggcagagaatgccttcgagcatttcaccttcgataaattgtttatgggcaccgacggcatcgatctcaatgcgggcgtaaccacctttaacgaggtttataccgtcagtaaggcaatgtgcaatgccgcgcgcgaagtgattttgatggcggacagtagtaagtttggccgtaaaagccccaacgtagtttgcagtcttgaaagcgtcgataagctgattaccgacgcaggtatcgatccggcgtttcgtcaggcgctggaagagaaagggatcgatgtgatcataaccggagagagcaatgagtgaagcactactgaacgcgggacgtcagacgttaatgctggagttgcaggaagcaagccgtttaccggaacgtctgggcgatgattttgttcgcgccgccaatatcatcctgcactgtgaaggcaaagtggtggttagcggaattggcaaaagcggccacattggtaagaaaatcgccgcaacgcttgccagtaccggcactccggctttttttgtccatccggcagaagcgctgcacggcgatctggggatgatcgaaagccgcgatgtgatgctgtttatctcttactccggtggcgcgaaggaactggatctgattattccgcgtctggaagataaatctatcgcgctgctggcgatgaccggcaaaccgacgagtccgctgggcctggcggcaaaagcggtgctggatatctccgtagaacgcgaagcctgcccgatgcaccttgcgccgacctccagcaccgtcaataccctgatgatgggtgacgcgctggcgatggcggtcatgcaggcgcgcggatttaatgaagaagattttgcccgctcccacccagccggggcactgggcgctcgcttgctgaataaagtgcatcatctgatgcgccgtgacgatgccatcccacaggtggcgttaaccgccagcgtgatggatgcgatgctggaactcagccgcaccggtctggggctggtggcggtatgtgacgctcaacaacaggtacaaggcgtctttaccgacggcgatttacgtcgctggctggttggcggcggcgcactcaccacgccagtcaatgaagcgatgacggtcggcggcaccacgttgcaaagccaaagtcgcgccatcgacgccaaagagatcctgatgaagcgcaaaatcactgccgcaccggtggtggatgaaaacggcaaactcaccggcgcaataaacctgcaggatttctatcaggccgggattatttaatccttcaatcccagacgtttcgccagccgatgcaggttggcgacgtcggtttccagcatccgcgcgcaggcagcccagttgtgatgattttgtgccagtgcctgacgaatagtttcacgctggaacgcttctgtcgcttcacgcaggttttgcttaacaacgggcaccgccgccacttctggcgtcggcaacgtcacctcaggaaaagcaaaatgttgcgcctcaagaatcacttcatcgccgctgcgggtggctctcgccagaactaccgcccgatgaatagcatgttccagttcgcgcacgtttcccggaaaactgtagtgttgcagtaaatttcgcgctccggcacttaataccacgcgggagagcccctgccgcaaacgacactgctcgcagaaataccccgccagcagaatgacatcatcgccccgctcacgcagcggcggcacgctaagtggaaacacgctcaggcgatgaaacaaatcggcgcggaatcgccctgccagcacctcttcgcgtaaatcgcggttagtcgccgccagcacgcgcacatcgacccgcaaacaacggtcatcgccaacgcgctgaatatcgccatactgcaacaccctcagcagcttggcctgcaatgccaagctcaactcgccgatctcatccagaaacagcgtgccgttatccgccatttcaaacttcccgctgcgattactgatagcgccagtaaacgctcctttcacatgcccgaacaactcactttccgccacactttccggcagtgcagcacagttgagatagaccagcggattcaccgcccgtgggctggcttcatgaatcgctttcgccaccagctccttaccggttccagtctcaccgctgatcaggacgttgagatcggacgccgccacaatctcaatctcttttttcagttgcgtcatgccaggggacaagccaatcatctgcgtctgtttcaccgcttcaaacggcgtggcatcgcctggcagcatattctggctttccagttgttcaatcagcaacgcattgcttaacgctcccgccgccagcgcagcaatcagccgtagctcttcgtcgctgaaaacatcgaactgatcgggctgcatcccgtcgagcgtcagtgcgccgatcaggttttgcccggcaaacaatggcagaccaacgcaggcgtgaaccttcagactctcctgcccaggaatcaaaccgtcatagggatcgggcaattcgctgtctgcgggaaagcgcaccacatccccggcgcgggcaatcgcttccagccgtggatgcccttccagcgcaaagcgtctaccgagtacatcctttgccagaccgtcgatggcaagcggaataaactgccggctatcgtaacgtagcaacgcagacgcatcgcactccagcacctgacgtagcgtggtgatcaggcgctgaaaacgatcctggtgaccaatcccacgctgcaattcgatggcgatattcgccagcacatcaacggaaaaactcatctttgcctcactgtcaatttgactatagatattgtcatatcgaccatttgattgatagtcattttgactactcattaatgggcataattttatttatagagtaaaaacaatcagataaaaaactggcacgcaatctgcaattagcaagacatctttttagaacacgctgaataaattgaggttgctatgtctattgtggtgaaaaataacattcattgggttggtcaacgtgactgggaagtgcgtgattttcacggcacggaatataaaacgctgcgcggcagcagctacaatagctacctcatccgcgaagaaaaaaacgtgctgatcgacaccgtcgaccataaattcagccgcgaatttgtgcagaacctgcgtaatgaaatcgatctggcggatatcgattacatcgtgattaaccatgcagaagaggaccacgctggggcgctgaccgaactgatggcacaaattcccgatacgccgatctactgtacagccaacgctatcgacagcataaatggtcatcaccatcatccggagtggaattttaatgtggtgaaaactggcgacacgctggatatcggcaacggcaaacagctcatttttgtcgaaacaccaatgctgcactggccggacagcatgatgacttacctgacaggcgacgcggtgctgttcagtaacgatgctttcggtcaacactactgcgacgagcatctgttcaacgatgaagtggatcagacggagcttttcgagcagtgccagcgttactacgccaatatcctgacgccgttcagccgcctggtaacaccgaaaattaccgagatcctgggctttaacttaccagtcgatatgatagccacttcccacggcgtggtatggcgcgataacccgacgcaaattgtcgagctgtacctgaaatgggcggctgattatcaggaagacagaatcaccattttctacgacaccatgagcaataacacccgcatgatggctgacgctatcgcccaggggattgcggaaaccgacccacgcgtggcggtgaaaattttcaacgtcgcccgaagcgataaaaacgaaatcctgactaatgtcttccgcagtaaaggcgtgctggtcggcactagcacgatgaataacgtgatgatgccgaaaatcgccgggctggtggaggagatgactggtttacgcttccgtaacaaacgcgccagtgctttcggctctcacggctggagcggcggtgcggtggatcgtctttccacgcgcctgcaggatgcgggtttcgaaatgagccttagcctgaaagcgaaatggcgaccagaccaggacgctctgaagttatgccgtgaacacggtcgcgaaatcgcccgtcagtgggcgctcgcgccgctgccgcagagcacggtgaatacggtagttaaagaagaaacctctgccaccacgacggctgacctcggcccacggatgcagtgcagcgtctgccagtggatttacgatccggcaaaaggcgagccaatgcaggacgttgcgccaggaacgccgtggagtgaagtcccggataacttcctctgcccggaatgctccctcggcaaagacgtctttgaagaactggcaagcgaggcaaaatgagtaacggcattgtgatcatcggtagcggcttcgccgcccgccaactggtgaaaaatattcgcaaacaggacgccactattccattaaccctgattgccgccgacagcatggatgagtacaacaaacctgacctcagccatgttatcagtcaggggcaacgtgccgatgaccttacccgccagacggcgggtgaatttgccgagcagtttaatctgcacctgtttccacaaacctgggtgacggatatcgatgccgaagcccgtgtggtgaaaagccagaataatcagtggcaatacgacaagctagtactggcaaccggtgccagtgcctttgtcccgcctgtgcctgggcgtgagttaatgctgacgttaaatagtcagcaagagtatcgcgcctgtgaaacgcaactgcgggatgcccgacgcgtgttgattgttggcggtggtttgattggtagcgaactggcgatggatttttgtcgtgcaggcaaagcggtcacgctaatcgacaacgctgccagtattctggcgagcttaatgccaccggaagtaagcagccgcttgcagcatcggttgacggagatgggcgttcatctgctgttgaaatctcagttacaggggctggaaaaaacggattctggcattcaggcaacgctggaccgccagcgcaatatcgaagtggatgcggtaattgccgccaccggactgcgcccggaaaccgccctggcacgacgcgccgggctgacgattaatcgcggcgtttgcgtcgatagttatctgcaaaccagtaataccgatatttacgcgctgggcgattgcgcggaaattaacggtcaggtattgccgttcctccagccgattcaacttagcgcgatggtgctggcaaaaaatcttctcggcaataacacgccgctgaaactcccggcgatgctggtgaaaatcaaaacgccggaattaccgctgcatctggcaggcgaaacccagcgtcaggatttacgctggcaaattaataccgaacgccagggaatggtggcgcgcggcgttgacgatgctgaccagcttcgcgcctttgtggtcagtgaggatcggatgaaagaggcatttggattgttgaaaacattgccgatgtaagtgggctactgtgcctaaaatgtcggatgcgacgctggcgcgtcttatccgacctacggggacgcatgtgtaggccggataaggcgtttacgccgcatccggcaatggtgtccaaatgcaacacgttttatccgttctggacttcacccgctaaccaacgcgccgcagcaataaccccctgccccagagacaaaccgccatcacccgccggtaaactctgtggaaagagcaatgtgaaatcagcgagataatgcgccagacgtgcacgcagcaaacggttatgaataaccccgccgctaaataccagcgtagtgataccacgcatcgtggcctgctcacgcatcaacgcggcaaaaccctgcgccagcgcatcatgaaacgcccacgcgcgttgattaaccggtgcctgccagttcagccactgctgccagaaagtggcgagatccagttgattgtccacccgcggcattgtcaccggatgcgtcactccgtggcaactggctgcgagcgcctccagagcacaagccgcttcaccttcataacttaacgtggctggcgcacagcccagtgccgccgccactgcatcgaaaaaacgcccacagctactcgccagcggcgcgttaattccacgctcaatggcccgcgccagcacgctccagttttgctgttgcacacttgctgtttcagagtaattctgccactccggcacaaagcgcaggcactgcgccagcaggtttcgccacggctgcttcgctgccaaatcgccacccggaagcgccactgcaggcaagccgcccaggtgctcacattcgcgatagttcacccgcaggcactcgccgccccacaaagcgccgttctcccccataccgataccgtcgagcgtcaaagcaatgacatcaccgccatccagcggccactgatgctctgccagacacgccgctgcatgggcatgatgatgcagtaccgtttgcgtcggcagattcatttcacgcgcccactggctggagacatagcccggatgcgcgtcatgcacaacgtattgcggggtaaaatcgtagatgttttgcatcaggcgtaacgcttcgcgccactgcatctggatgccatcgtcacttaaatcgcccagatgctgactcaacaccgcttgttcaccgcgcaccaggcagaaggtatttttcagatccgcgccgagacacagcacaggcggaacatttttaaagcccggaggcaaagccagcgcatccggcacatacccccggctacggcgcagcatttcgccgctttcgcgcaccacgctatcatccatccgctgcacgatgtcgcggttatgtatcaagaatccgtcggcaatgccctgcaaatccgccagcgcctgttcgttgctgatagctggtggtttaccgctcaggttgccggaggtcatcaccagcgggcattgcagttcctgtaacagcaaatgctggagcgggttcgcaggcaacattaccccgacttcgttaaggtcaggggcgatatcatcacaaagctcaggaacgtattttttatccaccagcacaatcggcgcggcgggcgtggtaagcaactggcgcgcagcgtctggtaaaccgtcagccactggcaacatgaccgccagcggtttcgccgggcgatgtttgcgcgcccgaagtgtcgccaccgcgttactgttacgtgcatcgcaggcaagatgaaatccgccaatccctttgatggcgacaattttgcccatttttaactgtgcgatagctgcctgtaatgccgcctcttgttccgcatgttcaccatgacttacccattcaagatgcgggccacactccgggcaggccaccggctgggcgtggaagcgacgatcgagcgggtcacggtactctttgtcacaggccggacatagcggaaacgccgccatcacggtaaacgggcggtcgtaaggcatggcgcgaataatggtgaaacgcgggccgcagtgggtacagttgataaacggataacgataacgccgttcgcctggggtattcatttcggcaaggcaagcagggcaagtagcggcatcgggaacaatttgcgtattcatggtgccgcctgtgctctggcgtatagtgaactcggtgggcagttgactccagataaacggctcacgctcgacgctatcaatacgcgccagcggcgggcagtgctgatacaattgaacaagaaacgtttccgggtcttcccgcagccggacttctacgccatcgccgtcattacagacatcgccgtgaagatttaattgctgtgccagctgccagacaaacggacgaaaaccgacgccctgcactttgccacgaatacgcagttggacaccgcaagatgtgttttttgccattgagttattcccgccatcatgaattgcgtaacccgccctgccggacacgacagcgtcgcatccggcagtcacaggtcggcgataccgcccgctccgtattctacgaatatttccgggaattcctttgatgccagaacagttctgtaagatttttagaacatcagcgccgtacggcggcgtttttctgcgctcagttgttcaagtttattacgatcgacacaaatcagcgcatgagtcgggcaagccgccatacacgccgggccgtcttcacgatggttgcacaggtcgcatttattggcttcggctttgtcagcccgtacattcagacccgcgccgctgttgcggatcaccggacgtaccaccacttccatcgcaccatacgggcaagccacaacgcaggttttgcaaccaatgcaacgttcctgcatcacatgaacaaaccctttatcacggctgatagcaccattcgggcagacgttagcgcacggtgcatcttcacactgacggcaaactgtcgccgtggaaatgttcacacctttaatgacatggatacgcggtaaaaaagtttccggggtcaggcttgcacagtcctgattttcctgatgagaaaccacgcacgctacttcacaggtacggcaaccaatacatttactcgcgtcagcaatgatgaaacggttcatcaaattctccagcaatgacagttaatgcgccgatacattcacaaatcatgccagtttttaatttactgttatttaaggaaattaatttctgtaatgcaggaaaaacgatgtcatcgacactagtgacgatgacatgtgatgacaatgtttatcggctaggagcaatgagactgtcgcggcggatcagttttccgctgaaggttttcggcggactgaaatccccgccatcgagcataaaaatcagccgtccaataatttcctgaatcatctcagtcaccggaatttttacgctggagagcgccggaacggtgtagggggcaatagcgatatcatcgaatccgataacactcacctgctctggcaccgctacgccgcgctcgtgtaacgctttcatcgcacctatcgccatatcgtcgttactggcaactaacgcgctaaatttagccccacgttcgagcaacatttctaccccttcggccccgctggcaggcgtccatttaccgttagcgataagtttttcattgagcgcaataccatgctgcgccagcgcgtctttatacccggcaagacgttcaatgctggtgggggaatccatgctgccggtaaggaaagcaatctcctgatgcccggcgtttatcaactctgccacggcgttaaaactggtctgtttatgatcgcaccagacgctatggctgctgtttttgcgcaggcggcgattaagcaccattatcggctgactgtgcgcgtcaatgatgtcatcgatctcatccacgcttaaaaaacgcgggtaaatcatgatcgcgtcgcagcgcagatccagcagatactgaatcgcctggcgctcttcttctgcgctgtgtttaccatctgccaatagcaactgccgccctttctcttccgccattcgcgcggcatgaaagagtaattcactaaaataaatgccgtggtaaagcgtgttggtcactaccagccccagcgtctgagtactcttcgcgctcagattgcgcgccagcaagtttggacggtaaccgctctcttctaccgcctgaaacacgcgatctttagtctcctggctgacgtagccattaccactaagcacgcgggaaacggtcgctttactaaccccggcgcgcttcgccacttccagcatcgtcgtcatcattttcatccctttacacgcaatcaacgcagtgtactgcaccgtttgccgattgtccttgcacaatcggcgggaaaaatattcaggtgaccggtttcacaaatataaaaaatgaacaattcactctcttgcttatttagtgacaactattcatgattttgtgaaaccggtttcttaattccgtttcagcatcggcatttttccgtcacgtcgactgataacaactacatctaccctactgataacaggataaaatccgatggccaaaaattatgcggcgctggcacgcagcgtgatagcggcactgggcggcgttgataacatcagcgcggtcacgcactgtatgacgcggttgcgctttgttatcaaagatgatgcacttatcgacagcccgacgttaaaaaccatccccggcgtgctcggcgtggtacgtagtgacaaccagtgtcaggtgattatcggcaataccgttagtcaagcctttcaggaagtcgtcagcctgctgccgggagatatgcagcccgcacagcccgtgggtaaacccaaactcacgctacgtcgcattggtgcggggatcctcgatgcgctgatcggcaccatgagtccgctgatcccggcgattatcggcggaagcatggtcaaactgctggcaatgatcctcgagatgagcggcgtgctgacaaaaggaagcccgaccttaaccattctgaatgtgattggtgacggtgctttcttcttcctgccgctgatggtcgcggcatctgccgccatcaaatttaaaaccaatatgagcctggcgattgccatcgcgggtgtgctggtacatccgagttttattgaactgatggcgaaagcggcccagggtgaacatgtcgaatttgccctgattccggtcaccgcggtgaaatacacctacacggtgatcccggcgctggtgatgacctggtgcctgagttatatcgaacgctgggtggacagcattacaccggcggtgaccaaaaacttcctcaaaccaatgctgattgtgttgattgccgcaccgctggcaatcctgctgattggcccgattggtatctggatcggtagcgccattagcgcgctggtttacaccattcatggttatctgggctggcttagtgtcgccattatgggcgcgctgtggcctctgctggtaatgaccgggatgcaccgcgtctttacgccaaccatcattcagaccattgccgaaaccggcaaagaagggatggtcatgccgagtgagatcggcgctaacctgagcctgggcggtagtagtctggcagtggcgtggaaaacgaaaaacccggaactgcgtcagacggcgctggctgcggcggcaagtgccattatggcggggatttccgaaccggcgttatatggcgtggcgatccgcctgaaacgtccgcttatcgccagtcttatcagcggttttatttgcggcgcggttgccggtatggcggggcttgccagccacagtatggcagcgccggggctatttaccagcgtgcagttcttcgatccggcgaatccaatgagcatcgtctgggtgttcgcggtcatggcgctggcggtggtgctgagctttatcctcacactgttgctcggctttgaggatattcctgttgaggaagcggctgcccaggcgcgaaagtatcagagcgtacaaccgaccgtcgccaaagaagtaagtcttaattgaggatgaaaatgagtgtatttccagaaagttttttatggggcggcgcgcttgccgccaaccagtctgaaggtgcgttccgtgaaggtgacaaaggtctgaccactgtcgatatgatcccacacggcgagcatcgaatggcggtgaaactggggctggaaaaacgttttcagttgcgagatgacgagttttatcccagccatgaggcgacggatttttatcatcgttataaagaagatatcgccctgatggcagagatgggattcaaggttttccgtaccagtattgcctggagccgtctctttccgcagggcgatgaaatcacgcccaatcagcagggcattgctttttatcgttctgtctttgaagagtgtaaaaagtacggtatcgaaccgctggtcacgttgtgccacttcgatgtgccgatgcatctggtcaccgaatatggctcctggcgtaaccgcaagctggtggagtttttcagccgctacgccagaacctgctttgaagcatttgatggtctggtgaaatactggctaaccttcaatgaaatcaacattatgttgcatagcccgttctccggcgcgggtctggtgtttgaagaaggtgaaaatcaggatcaggtgaaatatcaggccgcgcatcaccagctggttgccagtgcgctagccaccaaaatcgcccatgaggttaacccgcaaaatcaggtgggctgtatgctggcgggcggtaacttctacccttacagttgcaagccggaagatgtctgggcggcgctggagaaagaccgggaaaacctgttttttatcgatgtgcaggcgcggggcacgtatccggcttactctgcccgcgtattccgcgaaaaaggggtaaccatcaacaaagcaccgggcgatgatgaaatcctgaaaaacaccgtcgattttgtctctttcagctattacgccagccgctgcgccagcgcggagatgaacgccaacaacagcagtgcggcgaacgtggtgaaaagcctgcgtaatccgtatctacaggtgagcgactggggctggggaattgatccactcggtctgcgtatcaccatgaatatgatgtacgatcgttatcagaagccgctgtttctggtggaaaacggcctgggcgcaaaagatgaatttgctgccaatggcgagattaacgacgactatcgcatcagctacttacgcgaacatatccgcgcaatgggcgaagcgattgcagacggcattccgctgatgggctacaccacatggggctgtattgatttagtttccgcctctacgggtgaaatgagcaaacgctacggctttgtctttgttgaccgtgacgacgcaggcaacggtacgctgacgcgcacgcgtaagaaaagtttctggtggtataaaaaagtgattgccagtaatggggaagatttagagtaagtaacagtgccggatgcggcgtgaacgccttatccggcctacatgtcgcacgaaccatgaaggcccgataagcgcagcgcatcgggcaatttagcatttggcatcagagctggttcaccccatcaagaacatccctgtcctgattccttaatgaaaaattactcttcttccaccgctaactgcgcgaagccgccatttccttcccagccttccagtcgttgataaacggtttctaccgcatctttaatcggctgggtcatcgggtagtaaaagccgacgatatccggctgaatgccgaggaaaatcacttcgccaatatcttctttcaactggtcgataaggtaattcaacggcatgttatgggtagtcatcataaacatctcggcgatatcatccgggtcgatgatgcggatctcgccggggtttagccccatatccgtggcgtcgacaatcagcagtcgtgtcgggcgcagttcacggatagcgacgatgtcgttttccggtgcgctaccgccgtcaatcaccacccagttacctttcggcgcggcggcgcacttttccgccagcagcggacctgcgccatcatcgcccatcatgctattgccaacacagagtaaaacgtcagtcacgcagtctcctcaccatcaaatagatggcgttttcctgatgaatatcatgcagcatacttaacagcattgtactccattcctgctgctggctagtttgcgctgcccgggctttatcgaatgcgttggccagcatcggcacatggttaatgtcgatgacgatctcaccatatttcggcacgccttccattttgcggcgggcttcactgcctgcctccagagtggcaatccatgccagatattcatcccacgggcaggtgagcgccgcttccaggcaatcgataaccccaaggtggtgaccaatcgccaggctgtaatagaccacctgctgcgcctcggcgggcgtggcatcgttctcatcaataaatttatggctcagttgactgaacaccaccttttcactcatcggatacgcgcctcttcaacaacatgattcagatggctgacaatctcgttcagacgcggatcgttttccgcttccagccagcgtgcaacctgttcttcgccctgccctaactgtgtaaggtaatcatcggcaatctgacgaccgtaacgataacccgccaggcgacgtgcttcgcgatccactttcacgcgcagcggctgcaccatatcaccatgcaggatctccgccggttgttcatccagttcacccggcccacgggcgtgaattttctgctccagcaggccgagcgccattgcaaagccgtacagcgtggcggcaggcgttggcgggcagccagggatataaacatccacagggacaattttatccgtaccgccccacacgcagtagagatcgtggaagatcccgccactgttaccgcaggcaccgtaggagatacaaattttcgggtccggcgcggactgccacgcacgcagcgcaggggatcgcattgcacgggtgaccgcgccggtaaacagtaaaatatccgcatgacgcggactaggaacgactttaatgccgaagcgttctgcatcaaacagcgggctaagcgtggcgaaaatttcgatttcgcaaccgttgcagccgccgcagtccacgcggtaaacataggcagaacgtttgatttttttcagtaagctcgccttcatgctggcgatggattcatccaccgtcatggggaccggaatgccgttggcgtcacgggggcctaataaattgctcatcagatggcctctttcatatggcgagtcagttcaatacggtcggacggcaccaggcatttctggcgcttacattccgggcaagtctcaaagctttcgcggtggttttccgcgcggctgtcgccgttgtgcttaagcagcgcaatggcgtagtcgatctctttctggacggcgaaaggacgattgcagacgcggcagttgcacagcgcgaagcgggactgttgcaggaagtcttctttcttccacaccgccagttcgtactcttggctcagtttgatcgccgccgtcgggcagacttcttcgcagcgtccacagaagatgcagtgcccaagattaaactcccaggcaagctctcctgtggcgaggtcagtttcaaccgttaaggcgttactcgggcaggcattgacgcaggccgcgcagccgatgcactgctgcgggttctgctctggcttaccacggaagtttttatcaaccgcaatcggctccagcggataagagctggtcgccgtgccggttttgatgacttttttgataaaggtaaacatggcgattccttatttcagcgggctgtttttacgctcaatgctgtaacgctcgagttctttgtacggcaccactttgctcttcttcttacgcacatcgaccacggtcatgcggtcggtacaggagtagcaagggtcgaggctaccgataatcagcggcgcatcggaaacggtgttgccgcgcagcatgtagcgcagggtcggccagttcgcgtaggtcgcggcacggcagcgccagcggtacagcttctggttgtcgccggtcatgctccagtggatatcatcgccgcgcggcgcttcggcaaagcccagcgcaaagcggtgcggaatgtaggtaaagccttccaccatcagtgggccacccggcaggttatccagaccgtagtcgatcatgttcagcgcggtatagacttcgttgatacgcactttcagacgggaaataacgtcgcagccctgctcgctgtggacttccattggcagcaggccatagccgacaaacgggtgatcggcgcgggtatcacgggcgtgaccgctggcacggaccatcgggccgacgttactgaagtcgcgagcgatttccgggtccagacgaccaatgccgacagtgcgctgttccatgttcggagtgctcagcagcacatccaccagctcctgcacttcacgacgcatctgttgtgccagctggcgggtctggatcatgtcgtctttcagcagatcgcgacgaatcccgccgatcaagttcaggccgtaggttttacgcgcaccggtaaggatctctgccattttcatggaggtttcacgcacgcggaagaactgcataaagccggagtcgaagccggtaaagtgacaggccaggccaaggttgagcagatggctgtgcaagcgttctacctccagcagaatggcgcggatcatctgcgcacgttctggcacctgaatacccatcgcgttttccacgctcgtggtgtaggcggtgctgtgggcaaagccgcagatcccgcacacacggtcagagaggaaggtcacttcgttataacccatacgggtttccgccagtttttccatgccgcgatggacgtagaacagacggtagtcggcgtcgataatgttttcgccatcgacgaacagacggaagtggcccggttcatcagaagtgacgtgcagcggaccaatcggcacgacgttgtttttcttgtcgcccagttcgttgatgaactcgtaggtttcagcatcggtggtcggtgccggacgctgacgataatccatgctgtctttacgcagcggataaagttcatccggccagtcatccggcagcaccagacgacgttcatccggcagaccaaccggaatcaaaccgtacatatcgcgcacttcacgctcgccccacaccgccgccggaacgcgcggcgtcacggacggatattccggtttgttggcgtcaacttcgacgcgaaccgtaatccaacacttagtgcccttctccatgctcagcacgtagtaaacggcgtaatgaccattcagtttgcgttcgtcgttaccaaacagcacgctcagccagccaccctgtttgtagtaaagaaactccaccacttccggcaggtagttcacctttacggtgacagtcagctgatctttggtctgccaggcgtggtccagcacgacgcccggaaatgcctcattcagcgcggcgagataatgttgacctaatttttcttcagacatgctcaaactctctttaatcacgccgccagcaaggagacgaacgctaaaaatgcaaagccaaacccagcccaggtaatgcgcggagtaatatcaagacgcagacgggccatgctgttttcgaacagcgcgataaccaggacgccgaccaccagttttacgatggcaatcaccagcgccagcagcagtccaccggcggtgaaggtttccatttgtccccacggaataaacaccccgacgaacatctgcaacaccaccagctgtttcaggctgataccccatttcatgacgccaaagccgctgccgctgtattcagagagcgggccttcctgcagctcctgctcggcttccgccaggtcgaacggcagtttgcccatttcgataaaggtggcgaacgcacaggcacaaagcgccagtaccagcgggatgctctggctcagcggccagtgataaacggtgtcggtgatgttgctgatgttggtggaaccggcaacctgtgcggcaacccacagaccaagcagcagcatcggttcgaccagcacgccaagcatcgcttcacggctcgcgccgatagcggtaaacgggctaccggtatccagaccagaaatggcaaagaagaaacgcgcgatggcaaagagatacagtaaggtgatcaaatcacccagttgcggcagcggagaaccgacggtcaccaccggcagcgcagtagcgatagtcagcatgacgcccaccatcacatacggcgtcaggcggaacacccagccggaggcatccgggccgacgctctgacgccccagcagtttgataatgtcgcgatactcctgcaacacgcccggcccgcgacggttatgcaagcgggcgcgcgccacgcgggttataccggagagcagcggcgcaacggcaaataacaccagcgcctgaattaacggatataaaacactcattctcaggctcctcgactaacaataatcaccaccagtaccgccagttcaaccagcgccatccggcggaacagcaacgcactcccctcgcactgccagcccggcaccagagacaccggattcagccatttgcgtagtttcagcaccggcgcaaacgcctgtttcaccggcatggcaaaaccgtgagcggtaatcaccatacttttttcgtggtcgtaaccgcacacccaggccgcaccgcgggaacggcttggcaaacgatcgcctttgcaaatcgccataatgatgaatggcagcagcgggcaggcaatcagcagcaacgtgatcatcggttgagaaacggtggtgttagcaggctccagcggcagaggtacagcagcagagagcatcggcagtagccacggcgcagcaacaccgccaattacgcagcaaatcgccagtgccactacgcttacgctcatcaggagcggcgcacaggtggcgttttcggcttctttggtgcgcggcgcgccgaggaacgtgacgccatagactttcgccatacacatcaccgccagcgcaccggtaattgccagccccacagcgagcagcggccccagcagacgggcaacaaacgcgccactattgctcagtttgaaaaaactttgatagataacccattccccggcaaaaccattcagcggcggcagcgcagccattgccatcagcccgactaacatggcgatggagataaccggcattttcttgccaataccaccgagtttttcgatatcgcgatgaccggtacggaaccagacgctccccgccccgaggaacagtacgcttttgaacaggctatggttaagcagatggtacagaccaccgaccaggccaagagcaatcagcgccggttgttcgagcgcgatacccgttacgccagcgcccagccccagcaggatgatgccgatattttccagggtgtggtaagccagcaggcgctggatgttgtgctccaccagcgcatacagaccaccgacaaacgcggtgatcatgccgagcaccagcagcgcgatcccccaccacagcggtgcattaccgcccagcagactcagggttaaaatgcccagcaggccaattttcatgactaccgtagaaaacaacgcggcagctggcgcagaggcgttcgcatgtgcctgcggcacccagccgtgcagcggaataatcccggccagcaggccaaagccaatcactccgagcagccagatatcggaaccgagcggcagctgttgcatacgcatatccagcaggcgcagatccagcgtgccgtaacgctgccacagcagccagcaagcaatcgccagcagcagagtgccaagacgccccagcgcaaaccacagtttgccctctttgctgttgctggtgaggaacaccgcgcacagggccatgatttcggccattaccacgaacatgccgaggttgctggcaatgacggcgcagacggcggcagccatcaacatattgatctgcaagccgttgcacttcacctgcgcgtggcgatgccagtcaatgttgtagaggctgacaaacagaccgcacagaccgagcgtaatcagccaaatcgcgttaagcggagagatttgcacatcgtagcttaccaggctcagcgcaccgctcacgccaaccgcgccagtcagtacagtgaagcccgcggctgccgtatacagactaccaaccgcgccgccaattccagctatccagccacttaacgctttttgaaaagaaaagagaaatgccagaacagcggcggcgacaaaccacgccacgccgctattgatcagggaaattgcgctcatttagcctctccactttgagcctgctgaaacaaggtgagatcgccaaagtccgtgttaaaggtcagctcacgcttacgtttgctgacgcgggcgatatcggtgttatccaccagatgcagggctttagtcgggcacatccgcacgcaggccggaccttgttcatcaaagctacaaaggtcacatttgacggcgatcgcgcgaatacctggcacccagtcaagcaatgtgctgacacgcgccggagcaggcggtgccggtggcgctttcggggtattggcgtttgccggaatatccagcggacggctgccggaaaattcaattgcgccaaacgggcaggcgatgccgcacagcttgcagcttacgcacaggctttcattcaactgcacggccccatcgacgcgggtgatggcgttaaccgggcagaccaccgcgcagggtgcatcttcacagtggtgacagagctgcggcgcagattctttttcattcagcatcactctcaggcgcggcatactttgcaggccgtgctggcgatgcgtctcactacaggcggcctcacaagtgtggcagccgatacagagcgtggagtcagcaattacaaaacgattcaccaggcattcctcaggtgattgtcatttttgacgaaaacatgccgatgaaatgtcattttcgacactcatcgacacgcccatccccaaacaggcgtaacgcctgcaaaacgggcaaagcctcagctcatgctgccgggctttgtccctttaccagttggcttaaattcaccggcacattgttttcaatagcggtgtataagctgtcgtaaacgccagcgattttttcgagatagtgttccagaacctgttcgcgatcgcggatgttgaccttgccatcaatcatgccgtcaatgctcagttgcgcctgcgcaatccgctgtttgtcttcgccatcttttgtttcgacgtaatactcgatggtgtggctgttaaagccatccgccagggtgacgtaaatgcgaaaatgttcaaaaaggacgaaacagagttctttgtccggcgcgcagctcatggcgtgatgcaggcgcgctttgcttaacgtgatcccctgaaccaggctattgcagtagatgtgccactggtcctgtaggcgacgatgccgctgtgcgatgtaatcggctttctcgcttatttcccaaatagtcattgtcaggttacccgtttaacagagatgccagctttaagcattttttgtgccaacttttaatttattgttattaaagagatttttaagctaaagatgaatttcgtcgccgtgtcgacgtgtcatttcgacatcatcgacattattcaccgcagggataatcaacactggcacaattattgcttgtagctggcaatagttaatgggaggcgatatgcacgaaataaccctctgccaacgggcactggaattgatcgaacagcaggccgcaaaacacggcgcaaaacgcgtaactggggtctggctcaaaattggcgcattttcttgtgtcgaaaccagctctcttgccttttgttttgatctggtttgccgcggcagcgtggcggaaggttgtaaactgcacctcgaagaacaagaggccgaatgctggtgtgaaacatgccaacagtatgtgacgctactgacccagcgcgtccgccgctgtccacagtgtcatggtgacatgctgcagattgtggcagacgacggtttacagattcggcggatagaaatagaccaggagtgagcgatgtgtacaacatgcggttgcggtgaaggcaacctgtatatcgagggtgatgaacataaccctcattccgcgtttcgtagcgcgccatttgccccggcggcacgcccgaagatgaaaatcaccggcattaaagcgcctgaatttacccccagccagactgaagaaggcgacctgcattacggtcatggcgaagcgggcactcacgcaccgggcatgagccagcgtcggatgctggaagtcgaaattgacgtgctggacaaaaataaccgtctggctgaacgcaaccgcgcgcgctttgctgcccgcaagcaactggtgctcaacctggtttccagccctggttccggtaaaaccaccctgctgacggaaaccctaatgcgcctgaaagacagcgttccgtgcgcagttattgaaggcgaccagcaaaccgtgaacgatgccgcacgcattcgcgctaccggcacaccagcgattcaggtgaacaccggtaaaggctgccatcttgacgcacagatgattgccgacgccgcaccgcgtctgccactggacgataacggtattctgtttatcgaaaacgttggcaacctcgtatgcccggccagcttcgatctcggtgaaaaacacaaagtggcggtgctttccgttaccgaaggtgaagacaaaccactgaaatatccgcatatgtttgccgccgccagcctgatgctgctcaacaaagttgacctgttgccgtatctcaactttgacgttgaaaagtgcatcgcctgcgcccgcgaagtcaatccagaaattgaaatcatccttatttccgccaccagcggcgaagggatggaccagtggctgaactggctggagacacagcgatgtgcataaggtaaaactggctggagacacagcgatgtgcataggcgttcccggccagatccgcaccattgacggcaaccaggcgaaagtcgacgtctgcggcattcagcgcgatgtcgatttaacgttagtcggcagctgcgatgaaaacggtcagccgcgcgtgggccagtgggtactggtacacgttggctttgccatgagcgtaattaatgaagccgaagcacgcgacactctcgacgccttacaaaacatgtttgacgttgagccggatgtcggcgcgctgttgtatggcgaggaaaaataatgcgttttgttgatgaatatcgcgcgccggaacaggtgatgcagttaattgagcatctgcgcgaacgtgctagtcatctctcttacaccgccgaacgccctctgcggattatggaagtgtgtggcggtcatacccacgctatctttaaattcggcctcgaccagttactgccggaaaacgttgagtttatccacggtccggggtgcccggtgtgcgtactgccgatgggtagaatcgacacctgcgtggagattgccagccatccggaagtcatcttctgtacctttggcgacgccatgcgcgtgccggggaaacagggaagcctgttgcaggcaaaagcacgcggtgccgatgtgcgcatcgtttacagcccgatggatgcgttgaaactggcgcaggagaatccaacccgcaaagtggtgttcttcggcttaggttttgaaaccactatgccgaccaccgctatcactctgcaacaggcgaaagcgcgtgatgtgcagaatttttacttcttctgccagcacattacgcttatcccgacgttgcgcagtttgctggaacagccggataacggtatcgatgcgttcctcgcgccgggtcacgtcagtatggttatcggcaccgacgcctataattttatcgccagcgattttcatcgtccgctggtggttgctggattcgaaccccttgatctactacaaggcgtggtcatgctggtgcagcagaaaatagcggcccacagcaaggtagagaatcagtatcgtcgagtggtaccggatgccggtaacctgctggcgcaacaggcgattgccgatgtgttctgtgtcaacggcgacagcgaatggcgcggcttaggcgtgattgaatcttctggcgtgcacctgacgccggattatcaacgattcgatgccgaagcacatttccgcccggcaccgcagcaggtctgcgatgacccgcgcgcgcgttgtggtgaggtattaacgggcaaatgtaagccgcatcaatgcccgctgtttggtaacacctgtaatcctcaaaccgcgtttggtgcgctgatggtttcctccgaaggagcgtgcgccgcgtggtatcagtatcgtcagcaggagagtgaagcgtgaataatatccaactcgcccacggtagcggcggccaggcgatgcagcaattaatcaacagcctgtttatggaagcctttgccaacccgtggctggcagagcaggaagatcaggcacgtcttgatctggcgcagctggtagcggaaggcgaccgtctggcgttctccaccgacagttacgttattgacccgctgttcttccctggcggtaatatcggcaagctggcgatttgcggcacagccaatgacgttgcggtcagtggcgctattccgcgctatctctcctgtggctttatcctcgaagaaggattgccgatggagacactgaaagccgtagtgaccagcatggcagaaaccgcccgcgcggcaggcattgccatcgttactggcgatactaaagtggtgcagcgcggcgcggtagataaactgtttatcaacaccgctggcatgggcgcaattccggcgaatattcactggggcgcacagacgctaaccgcaggcgatgtattgctggtgagcggtacactcggcgaccacggggcgactatccttaacctgcgtgagcagctggggctggatggcgaactggtcagcgactgcgcggtgctgacgccgcttattcagacgctgcgtgacattcccggcgtgaaagcgctgcgtgatgccacccgtggtggtgtaaacgcggtggttcatgagttcgcggcagcctgcggttgtggtattgaacttagtgaagcggcactgcctgttaaacctgccgtgcgtggcgtttgcgaattgctgggactggacgccctgaactttgccaacgaaggcaaactagtaatagctgttgaacgcaacgcggcagagcaagtgctggcagcgttacattcccatccactggggaaagacgcggcgctgattggtgaagtggtggaacgtaaaggtgttcgtcttgccggtctgtatggcgtgaaacgaaccctcgatttaccacacgccgaaccgcttccgcgtatatgctaataaaattctaaatctcctatagttagtcaatgaccttttgcaccgctttgcggtgctttcctggaagaacaaaatgagttatacaccgatgagtgatctcggacaacaagggttgttcgacatcactcggacactattgcagcagcccgatctggccagcctgtgtgaggctcttagccaactggtaaagcgttctgcgctcgccgacaacgcggctattgtgttgtggcaagcgcagactcaacgtgcgtcttattacgcgagccgtgaaaaagacacccccattaaatatgaagacgaaactgttctggcacacggtccggtacgcagcattttgagccgccctgatacgctgcattgcagttacgaagaattttgtgaaacctggccgcagctggacgcaggtgggctatacccaaaatttggtcactattgcctgatgccactggcggcggaagggcatatttttggtggctgtgaatttattcgttatgacgatcgcccctggagcgaaaaagagttcaatcgtctgcaaacatttacgcagatcgtttctgtcgtcaccgaacaaatccagagccgcgtcgttaacaatgtcgactatgagttgttatgccgggaacgcgataacttccgcatcctggtcgccatcaccaacgcggtgctttcccgcctggatatggacgaactggtcagcgaagtcgccaaagaaatccattactatttcgacattgacgatatcagtatcgtcttacgcagccaccgtaaaaacaaactcaacatctactccactcactatcttgataaacagcatcccgcccacgaacagagcgaagtcgatgaagccggaaccctcaccgaacgcgtgttcaaaagtaaagagatgctgctgatcaatctccacgagcgggacgatttagccccctatgaacgcatgttgttcgacacctggggcaaccagattcaaaccttgtgcctgttaccgctgatgtctggcgacaccatgctgggcgtgctgaaactggcgcaatgcgaagagaaagtgtttaccactaccaatctgaatttactgcgccagattgccgaacgtgtggcaatcgctgtcgataacgccctcgcctatcaggaaatccatcgtctgaaagaacggctggttgatgaaaacctcgccctgaccgagcagctcaacaatgttgatagtgaatttggcgagattattggccgcagcgaagccatgtacagcgtgcttaaacaagttgaaatggtggcgcaaagtgacagtaccgtgctgatcctcggtgaaactggcacgggtaaagagctgattgcccgtgcgatccataatctcagtgggcgtaataatcgccgcatggtcaaaatgaactgcgcggcgatgcctgccggattgctggaaagcgatctgtttggtcatgagcgtggggcttttaccggtgccagcgcccagcgtatcggtcgttttgaactggcggataaaagctccctgttcctcgacgaagtgggcgatatgccactggagttacagccgaagttgctgcgtgtattgcaggaacaggagtttgaacgtctcggcagcaacaaaatcattcagacggacgtgcgtctaatcgccgcgactaaccgcgatctgaaaaaaatggtcgccgaccgtgagttccgtagcgatctctattaccgcctgaacgtattcccgattcacctgccgccactacgcgagcgtccggaagatattccgctgctggcgaaagcctttaccttcaaaattgcccgtcgtctggggcgcaatatcgacagcattcctgccgagacgctgcgcaccttgagcaacatggagtggccgggtaacgtacgcgaactggaaaacgtcattgagcgcgcggtattgctaacacgcggtaacgtgctgcagctgagtttgccagatattgttttaccggaacctgaaacgccgcctgccgcaacggttgtcgccctggagggcgaagatgaatatcagttgattgtgcgcgtgctgaaagaaaccaacggcgtggttgccgggcctaaaggcgctgcgcaacgtctggggctgaaacgcacgaccctgctgagtcggatgaagcggctgggaattgataaaagcgcattgatttaactgcaaattgccggacagatctgcctgtccggcatattattcatgaggttttttcggacgatatttttccggcagttctggcaccggacgcttgtcatcgatgagatgacgcacggttaagatcggatgacgccacagcattctcggcccggcccaacgcataatctgtttcatctcttcacgctttgcaggctggtaacagtgcaccggacactgcttacaggctggtttctcttcgccgaacacacatttatccagccgcttttgcgcgtaaacaaacaacgcctcgtaatgctccggctccgcactcgcctgcgggcatttcgcttgataaagatcgatcatttttttaatcgtcagtttttcacgagagatacgcttgccggacatgctgcctccacctcattaagatgtatttatattacatcttaatcttaaagggcactatgactccaaagaagaagggttagccaaccgatacaattttgcgtacttgcttcataagcatcacgcaaaagctgcaaaacagcatctttcccggaaccagcatcaagaactcgccgttcgcttcttcccctgaaatgattaactccggtatcatgtgcgccttatgtgattacaacgaaaataaaaaccatcacaccccatttaatatcagggaaccggacataaccccatgagtgcaatagaaaatttcgacgcccatacgcccatgatgcagcagtatctcaggctgaaagcccagcatcccgagatcctgctgttttaccggatgggtgatttttatgaactgttttatgacgacgcaaaacgcgcgagccaactgctggatattagtctgaccaaacgcggtgctagcgcgggagagccgatcccgatggcggggattccctaccatgcggtggaaaactatctcgccaaactggtgaatcagggagagtccgttgccatctgcgaacaaattggcgatccggcgaccagcaaaggtccggttgagcgcaaagttgtgcgtatcgttacgccaggcaccatcagcgatgaagccctgttgcaggagcgtcaggacaacctgctggcggctatctggcaggacagcaaaggtttcggctacgcgacgctggatatcagttccgggcgttttcgcctgagcgaaccggctgaccgcgaaacgatggcggcagaactgcaacgcactaatcctgcggaactgctgtatgcagaagattttgctgaaatgagcttaattgaaggccgtcgcggcctgcgccgtcgcccgctgtgggagtttgaaatcgacaccgcgcgccagcagttgaatctgcaatttgggacccgcgatctggtcggttttggcgtcgagaacgcgccgcgcggactttgtgctgccggttgtctgttgcagtatgcgaaagatacccaacgtacgactctgccgcatattcgttccatcaccatggaacgtgagcaggacagcatcattatggatgccgcgacgcgtcgtaatctggaaatcacccagaacctggcgggtggtgcggaaaatacgctggcttctgtgctcgactgcaccgtcacgccgatgggcagccgtatgctgaaacgctggctgcatatgccagtgcgcgatacccgcgtgttgcttgagcgccagcaaactattggcgcattgcaggatttcaccgccgggctacagccggtactgcgtcaggtcggcgacctggaacgtattctggcacgtctggctttacgaactgctcgcccacgcgatctggcccgtatgcgccacgctttccagcaactgccggagctgcgtgcgcagttagaaactgtcgatagtgcaccggtacaggcgctacgtgagaagatgggcgagtttgccgagctgcgcgatctgctggagcgagcaatcatcgacacaccgccggtgctggtacgcgacggtggtgttatcgcaagcggctataacgaagagctggatgagtggcgcgcgctggctgacggcgcgaccgattatctggagcgtctggaagtccgcgagcgtgaacgtaccggcctggacacgctgaaagttggctttaatgcggtgcacggctactacattcaaatcagccgtgggcaaagccatctggcacccatcaactacatgcgtcgccagacgctgaaaaacgccgagcgctacatcattccagagctaaaagagtacgaagataaagttctcaccagtaaaggcaaagcactggcactggaaaaacagctttatgaagagctgttcgacctgctgttgccgcatctggaagcgttgcaacagagcgcgagcgcgctggcggaactcgacgtgctggttaacctggcggaacgggcctataccctgaactacacctgcccgaccttcattgataaaccgggcattcgcattaccgaaggtcgccatccggtagttgaacaagtactgaatgagccatttatcgccaacccgctgaatctgagcccgcagcgccgcatgttgatcatcaccggtccgaacatgggcggtaaaagtacctatatgcgccagaccgcactgattgcgctgatggcctacatcggcagctatgtaccggcacaaaaagtcgagattggacctatcgatcgcatctttacccgcgtaggcgcggcagatgacctggcgtccgggcgcagtacctttatggtggagatgactgaaaccgccaatattttacataacgccaccgaatacagtctggtgttaatggatgagatcgggcgtggaacgtccacctacgatggtctgagcctggcgtgggcgtgcgaggaaaatctggcgaataagattaaggcattgacgttatttgctacccactatttcgagctgacccagttaccggagaaaatggaaggcgtcgctaacgtgcatctcgatgcactggagcacggcgacaccattgcctttatgcacagcgtgcaggatggcgcggcgagcaaaagctacggcctggcggttgcagctctggcaggcgtgccaaaagaggttattaagcgcgcacggcaaaagctgcgtgagctggaaagcattagcccgaacgccgccgctacgcaagtggatggtacgcaaatgtctttgctgagtgtaccagaagaaactagccctgcggtcgaagctctggaaaatcttgatccggatagtctcaccccgcgtcaggcgctggagtggatttatcgcttgaagagcctggtgtaataacaattcccgatagtcttttgctatcgggaatattaacgacaactgacgaataaaataaaaacaccctgtataataggaaagcttattttacagggtaaaaccatgccatctacacgctatcaaaaaatcaatgcccatcactatcgccatatatgggtcgttggtgatattcatggtgaatatcagttattacaatcccgcttacatcaactctcttttttccccaaaatcgacttacttatttctgtcggcgataatattgatcgtggaccggagagtcttgacgtcctgcgcctgctaaaccaaccctggtttacgagcgttaaaggcaaccacgaagcgatggcgcttgaggcattcgaaactggcgatggcaatatgtggcttgccagcggtggtgactggtttttcgatttaaatgatagtgagcaacaagaggcaatagatctgttgctgaaattccatcaccttccacatattattgaaatcactaacgacaacataaaatatgccatcgcacatgcagattatccggggagtgaatatctctttggtaaagaaatagcggagagcgaattactctggcctgttgatcgtgtgcagaaaagccttaatggcgagttacaacaaataaacggcgctgattattttatatttggacatatgatgtttgataacattcagacgttcgctaaccagatttatattgataccggaagcccgaacagcgggcggctgagtttttataaaataaagtaatctcatgcttcttctgtgaagcatgagtaacccggtgttattgcaggccattattcatttttcgctaccagcaaagagagatcctgcttcaccagcgcgcgactggcactctccggcaaaccgtcgtctgtaataatctgatcaaactcgcttaatggtaacgccagccatgtcgccacctgaccatatttcgtcgcatcacagaccaaaactcgctggcggctggcactggcaatcgcccgtttcaccgtgactttatcttccgctggcgtagaaatcccccgcacactccaactgcttgcagaaataaaagcctgatcaatcatcaggctgcgcagcatggtcgcagcggcttccccgacacaggaacggttttcccgacacactgcaccgccagtgtgaataattgtgcaattactgttgtcgagcaagtagtccgcaataacgaaatcgtttgtgaccacagtcagactctccatgtgaatcagatgctgtgctatcgctaacgtggtcgttcccgcatccagatagatacaacttcccggctgaacaagacttgccgccagcttgccaatagccgctttttgcgtcattgccagcgcagtttttacctgatgagaaggttcatgcgccacgcgtcccggagactggacgcctccggacaccagcacaacggctccctgctgctccagtttttgtaaatcccgacgaatggtcatatgactcacattcattctgtccgttagttcagcaatactgacaatgcctttttcagctaccatctcaaggatgatttggcgacgctctacgggtatcaacttttgctccttcctttgtcctgcactcattctacgctatttgcctgcgaaacgtgcgcggcgcaactaacgcttagttcacataaaataacacacaatgttaatttatgtgaatcagatcaccataccgttatcttccagcgcttatattcacaatatcaaacaaaatatcacttaaattaacaaggagagcagatgaaaacgggatctgagtttcatgtcggtatcgttggcttagggagtatgggaatgggagcagcactgagttatgtccgcgcaggtctttctacctggggcgcagacctgaacagcaatgcctgcgctacgttgaaagaggcaggtgcttgcggggtttctgataacgccgcgacgtttgccgaaaaactggacgcactgctggtgctggtggtcaatgcggcccaggttaaacaggtgctgtttggtgaaacaggcgttgcacaacatctgaaacccggtacggcagtaatggtttcttccactatcgctagtgctgatgcgcaagaaattgctaccgctctggctggattcgatctggaaatgctggatgcgccagtttctggtggtgcagtaaaagccgctaacggtgaaatgactgtcatggcctccggtagcgatattgcctttgaacgactggcacccgtgctggaagccgttgccggaaaagtttatcgcataggtgcagaaccgggactaggtagcaccgtaaaaattattcaccagttgttagcgggcgtacatattgctgccggagccgaagcgatggcacttgcagcccgtgcggggatcccgctggatgtgatgtatgacgtcgtgaccaatgccgccggaaattcctggatgttcgaaaaccggatgcgtcatgtggtggatggcgattacaccccgcatagtgccgtcgatatttttgttaaggatcttggtctggttgccgatacagccaaagccctgcacttcccgctgccattggccagtacagcattgaatatgttcaccagcgccagtaacgcgggttacgggaaagaagacgatagcgcagttatcaagattttctctggcatcactctaccgggagcgaaaagttgagctaaactctaccgggagcgaaatcatgatcaagattggcgttatcgccgatgattttaccggcgcgacggatatcgccagttttctggtggaaaacggtctaccaacggtacaaattaacggtgttccaacaggtaaaatgccggaagcaatcgacgcactggtgatcagcctgaaaacgcgctcctgtccagtggttgaagccacacagcaaagcctggcggctctgagctggttgcaacagcaaggttgcaaacagatctatttcaaatactgctctactttcgacagtacggcgaaaggtaatattggcccggttaccgatgccttaatggatgctctcgacacgccgtttacggtcttctctccggccctgccggtcaacggacgtacggtttatcaggggtatttgttcgtaatgaatcaactgctggccgaatccgggatgcgccatcacccggtaaatcccatgaccgacagctatcttccccgtctggttgaagcgcaatccacagggcgctgcggcgtcgttagcgcacatgttttcgaacaaggtgtggatgccgttcgtcaagagctggctcgcttacagcaagagggctaccgctacgcggtgcttgatgcgctgaccgaacaccatctggaaattcagggagaagccttgcgcgatgccccactggtaacgggcggttctggtctggcgattggcctggcccggcagtgggcgcaagaaaacggtaaccaggctcgcaaagcagggcgtccgctcgctgggcgcggcgtagtgctctccggtagttgctctcaaatgaccaaccgccaggtagcacattaccgtcaaattgcaccagcccgtgaagttgatgtggcacgctgcctcagtattgaaactctggccgcttatgcacacgaactggcagagtgggttctgggccaggaaagtgtacttgctccactggtttttgccaccgccagcactgacgcattggcagcaattcaacagcaatacggtgcacaaaaagccagtcaggcagtagaaacactgttttctcaactagcggcgcggttagcagcggaaggcgtgacacgctttattgtcgcaggcggtgagacctccggcgtagtcacacagagcctgggaataaaagggtttcatattggcccaaccatttccccggcgtgccgtgggtaaacgcactggataagcctgtctcactcgcccttaaatctggcaacttcggtgatgacgcctttttttcacgagcccaaagagagtttttatcatgagcgatttcgcaaaagtagagcagtctttgcgagaggagatgacgcggattgccagtagtttctttcagcgcggctatgcaaccggtagcgctggcaatctgagcctgcttttacctgacgggaatttactggcgacaccgacaggtagttgcctgggcaatctcgatccgcagcggctttccaaagtcgccgcggatggcgaatggttaagtggtgacaaacccagcaaagaggtgctctttcatctggcgctgtatcgcaacaatccgcgctgtaaagcggtggtgcatttgcacagcacatggagcacggcgctttcctgcctgcaagggctggacagcagcaacgttattcgtccgttcacaccatacgtggtgatgcggatgggaaatgtcccgctggtgccttattaccgaccgggcgataaacgcatcgcacaggatctggcggaactggcagcagacaatcaggcttttttactggcaaatcatggcccagtggtttgcggtgaaagcctgcaagaagccgccaacaatatggaagagctggaggaaacggcaaagctgatttttattctcggtgaccgcccgatccgttatctgaccgcaggtgaaattgcggaattaaggagttaatgcaatgcctcgttttgcagctaatttatccatgatgttcaccgaagtgccttttattgaacgcttcgccgcagcgcgaaaagccgggttcgatgctgtggaatttctgtttccctataactactccaccctgcaaatccaaaagcaactggagcaaaaccatctgacactggcgctgttcaataccgctcccggagatattaatgcgggggaatggggattatccgcccttcccggacgtgagcacgaagcacacgcagacatcgacctggcactggaatatgcattggcgctcaattgtgaacaagtccatgtgatggcaggcgtcgtgcccgctggcgaagatgctgaacggtaccgggcagtatttatcgataatatccgctacgctgccgaccgctttgcgccacacggcaagcgaatattagttgaagcactcagccccggcgttaagcctcattatctcttctccagccagtatcaggcactggctattgttgaagaggttgcgcgagataacgtgtttattcaactagatacttttcatgcgcaaaaagtagatggcaacctgacgcatttaatccgcgactacgccgggaaatatgcgcacgtacaaattgccggactacctgatcgacatgaaccggacgatggagaaatcaactatccgtggctgttccgcctgttcgatgaggtgggatatcagggctggatcggttgtgaatataaacctcgtggcctcaccgaagaagggcttggctggtttgacgcctggcgctaattcgttaaatccctaattacaacgtacccatacatccccccatctacggatggggtaggttaactataactttcagacagggtttcccatgtccacaattacattgttatgcattgcgttagctggcgtaatcatgctgttgctgctggtcatcaaggcaaaggtacaaccattcgttgctttgctcctcgtcagcctgttagtcgcacttgcggcaggtataccggcgggcgaagtgggtaaagtgatgatcgccgggatgggcggtgtgcttggttccgtcactattattattggtctgggcgctatgctggggcgtatgatcgaacactctggtggtgcagagagtctggctaattatttcagtcgcaagttaggtgacaaacgaactatcgctgcgctgactctggcagcgttcttcctcggtattcccgtcttctttgatgtcggctttattattcttgcgccaatcatttacggttttgccaaggttgccaaaataagcccactcaaatttggcctgcctgtcgctgggatcatgctcactgttcacgtggcggtaccgccgcatccaggccctgtcgccgcagcggggttactccacgcagacatcggctggctaaccatcatcggtattgcgatttctattcccgtaggggttgttggctactttgcagcgaaaataatcaataagcgccaatatgcgatgagtgtagaagtactggaacagatgcaactggctccggccagtgaggaaggcgcgacaaaattaagcgataaaataaatccaccgggcgtcgcgctggtcaccagcctaattgttattcctatcgcgattatcatggcgggtacggtttccgcaacactgatgccgcctagccatcccctgcttggtacgctacagctgatcggcagtccaatggtagctctaatgattgcgctggtgctggcattctggttattggctttacgtcgcggctggagcttacaacacaccagcgacattatgggcagtgcgcttcctactgcggcggtagtgattttggttactggtgctggaggggtatttggcaaagtgctggtggaaagcggcgtcggcaaagcccttgccaacatgctacaaatgattgacctgcctctgttaccagccgcatttattattagtctggcgctgcgtgcaagccaggggagtgcaaccgtagcaatactgacaaccggcgggttactcagtgaagcggtgatgggattgaatccgattcagtgcgtattggtgacgctggcagcctgctttggtgggcttggtgcgagtcatattaatgacagtgggttctggattgtgaccaaatatctggggttgagcgtagcagacggtctgaaaacctggacagtgttaacgaccattctcggttttaccggattcttaattacctggtgcgtatgggcggtaatttgaccttaataaaaaggtccgatgggcatcggaccttttattgtgcacagaaaaggccagcctcgcttgagactggcctttctgacagatgcttacttactcgcggaacagcgcttcgatattcagcccctgcgtttgcaggatttcgcgcaaacggcgcaggccttcaacctgaatctggcgaacacgttcacgggtgaggccaatttcacgacctacatcttccagtgttgccgcttcgtaccccagcaaaccgaatcgacgtgccagcacttcacgctgtttggcgttcagctcgaacagccatttgacgatgctctgcttcatatcgtcatcttgcgtggtatcttccggaccgttctctttttcatcggccaggatgtccagcaacgctttttcggaatcaccacccagcggggtgtctacgctggtaatgcgctcgttaagacgaagcatacggctgacgtcatcaactggcttatccagttgctctgcgatctcttccgcacttggttcatggtccagcttatgggacaactcacgtgcggttcgcaggtaaacgttcagctcctttacgatgtgaatcggcaaacgaatagtacgggtttggttcataatcgcccgttcaatcgtctggcgaatccaccaggttgcgtatgtactgaagcggaaaccacgttccgggtcaaacttctctaccgcgcggatcagccccaggttgccctcttcgataaggtccagcaacgccagaccacgattgccataacggcgggcaatttttaccaccagacgcaagttactctcgatcatccggcggcgagaggcgacatctccacgcagtgcgcgacgcgcaaaataaacttcttcttcggccgttaacagtggactataaccaatctcaccaaggtaaagctgagtcgcgtccaacacacgctgtgtggctccctggcttaacagttcctcttcggccaaatcgttatcactgggttcctgttctactaaggccttttcgtcaaaaacctcaactccgttctcatcaaattccgcatcttcatttaaatcatgaactttcagcgtattctgactcataaggtggctcctacccgtgatcccttgacggaacattcaagcaaaagcctggttccgccgatttatcgctgcggcaaataacgcagcgggtttacggatttccccttgtaacgaatttcaaaatgcaagcgtgtactactggttccggtgctacccatggtcgctattttttgccccgccttaacttcttgttgttcccggaccagcattgtgtcgttatgggcgtaggcactcaggtaatcatcattatgtttgatgataatcagattaccgtagccgcgcagcgcgttaccagcataaacaacgcggccatctgcggtcgcgataattgcctgtcctttgctgcctgcgatatcaatccccttgttgcccccctcagaagcgccaaaggtttcgatcactttgccctcagtcggccagcgccaggtggagataggcgtactggtacttgtactgctgacagtcggctcggttgtgcttgctgttggtaccgttacaggcgctgtgaccgtggtcgcagttggcttgttgttcggcaacattttgttagcactctgttcaccgctagactcagaatacgtaattgtcggttggctcgcaacagcaacggtggaattttgtgcaggcttgatcacaactccttgctctgctgcgtcggcctgggtaatggcatttccgccagtgattggcgtaccggaagcattacccacctgcaaggtctgaccaacgttcagcgcgtatggtgcctgaatattgttgcgctgagcaaggtcacggaaatcgttgccagtaatccaggcgatatagaaaagtgtgtcgccttttttcacggtataggtactgccgctataactgcctttcggaatgttcccatactgacggttatagacgatgcgtccgttttccatctgtaccggctgctgagctactggctgcactggctggatttgcggttgttgagtagcctgaatttgtggctgctgcaccggctgaatttgcggttgctgcgctgtagacgtcgtccccattttcggcggcggcgtaatcaacataccagaattagtatttgcaggcgcattgccattaacggagctgaccggtgccggtggattactagtgtcagaacagcctgccagccataggctaaccagactcaaagccgcaatgcggcgaacggtgaattttgggcttcccgcgctcatttatcccccaggaaaaattggttaataaccagtgacataattaccgtgcaaggcaccctactgaacactggaaaagatgttcacgatacgctgacctgcggcaaaataaccaggaaaaatccaggtatttcctcacgttttaagccagctcacccttcactaaagggacaaagcgcacggcctccacggtatcgataataaattcgcctccccgacgacgcacccgtttcaaatactggtgctcctcccctacgggtaagacgagaatcccgccttcgtccagctgcgtcattagcgcagttggaatttccggcggtgccgccgtaacaatgatagcgtcaaacggcgcacgtgcctgccaaccttgccatccatcgccatgacgggtactaacattatgtaaatcaagatttttcaggcggcgacgtgcctgccactgcaagcctttaatccgttcaacgctgcaaacatgctggacaagatgcgccaggattgccgtttgatatccgctaccggtgccaatttccagcacccggctctgcggcgtcagctcgagtaattcggtcattcgcgccaccatatatggctggctaattgtctgcccctgacctatcggcaaagcgatattgtcccaggctttttgttcaaacgcttcatcaacgaatttttcacgcggcacggcggcaagtgcattcagcacctgctcatcctgaataccttgcgcacgtaattgatccagaagtgcttgtacgcgtctgcttaccattgcgtgccaactcccacgctgtttaaccagtcactaaccacatcttgcgcgctatgcgcagttaaatccacatgcagcggcgtgatggagacatagccctcatctaccgcagcaaaatcggtccccggaccagcatcacatttaccgcccggcgggccaatccagtacagcgtattgccgcgcggatcttgctgcgggatcacctgatctgccggatgtcgtgtaccgcagcgcgtcacgcgaatacctttgatttgatccaagggtaaatccggaacgttaatattaagaatacgcccggtgcgcagcggctctttacacagtgcgcgcaaaatactacaggttaccgccgcggcagtgtcgtaatgtttatgcccgtcaaggctgacggcaagcgccggaaaacctaaatgacggccttccatcgcggcggctaccgtaccggaataaataacatcatcccccagattcggcccggcgttaattccggacacaacaatgtccgggcgcggacgcatcagagcattcacgccaagatagacgcaatcggtcggggttcccatttgcacagcaatatcaccattttcaaaggtaaacgtgcgcagggaggattccagtgtcagagaattactagcgccgctgcggttacgatcgggggcgaccacctgaacgtcagcaaactcacgcaaggctttcgccagcgtttgtataccgggtgcatgtaccccgtcatcattactcagcaatatgcgcataatcacctgttgtgttgataagttccctgacaacgctggttgcaaaactacccgccggaagccagaaacggatctctacggtgacgtcatcccaccaattccagcttaattgttgcggatacagcagcatcgctctgcgcgcggcttcaactttttcgcgcaccagtaaagcttgtaattcagtttctgcggcgacagctgcttgttcgaatgccagcgcttcacgctgagttccccattcgccactgcctggcaatgcggcggttatcatcaactctttatcgttgacgcgacgctgtaattccgccagttcttcggtggttgcgacaaaccagctaccacgtccggctaattgtagcgcatcgccgtcaacaacttgattaacgtctgcttttttgaggcgctcagcaacaatctgattaaacaacgcactgcgggctgcgctcaaccaaaaactccgtttattgcgatcgcgcaccggagtattggtttgcgcccagcgctgcgccccctgcaagttgctaccgccaatcccaaaacgttgggcaccgaagtagttcggtacaccttttacgcaaatatcgatcagacgttgttcaacgtcatcgcgattgctcacttcgcgcagaaccagggtaaaggcgttacctttcagcgcgcctaaacgcagcttgcgcttgtgccgcgcatactccagcacctggcagccttccagttgaaaggcgctcagatcgggcatttccttgcccggcacgcgagcgcataaccactgttccgtaacagcatgtttgtctttttgcccagcgaagctgacttcacgggcatgaattttcaggaatttcgccagtgcatccgccacaaaacgggtattgcagccgtttttgaggattctaaccagaatatgctcaccttcaccatcaggctcaaagcccaaatcttccaccaccacaaagtcttccggattggctttcagcagcccggtgccttgcggtttaccgtggaggtaagtgagattatcaaactcaatcattttgttgccttaatgagtagcgccaccgcttcacaggcaatcccttccccacgtccggtaaatcccagtttttccgtagtagtggctttcacgttaacatcatccatatggcagccgagatcttcggcaataaacacgcgcatttgtggaatgtgcggcaacatcttcggtgcctgagcgatgatagtgacatcgacgttgccaagggtataacccttcgcctgaatacgacgccaggcttcgcgtagcagctcgcggctatcggcacctttaaatgccggatcggtatccgggaacagcttgccgatatcccccagcgccgccgcgccaagcaatgcatcggtcaacgcatggagcgccacgtcgccatcagaatgcgccagcaatcctttttcgtaaggaatgcgtacgccaccaatgataattgggccttcaccgccaaaggcatgtacgtcaaaaccgtgtccaattcgcattatgtattctcctgatggatggttcgggtgaggtaaaactcggccagtgccaaatcttccgggcgcgtgactttaatgttatccgcacggccttcgaccaactgaggatggaatccgcaatattccagcgcgctggcttcgtcggtaatagtcgcgccttcatttagagcgcgcgtcagacagtcatgtaacagctcacgagggaaaaattgcggcgtcagcgcgtgccataagccgttgcgatcaacggtatgagcaatggcatttttgcccggttcggcacgtttcatagtatcgcgcactggtgcggcgaggatcccccccgtgcggctggtttcgctcaacgccaacaatcgcgcgaggtcatcctgatgcaaacaaggacgagcggcgtcatgcaccaatacccactgcgcgtcgccagcggctttcagacctgccagcacggaatcggcacgctcatcaccgccatctacaacggtgatttgcggatgattcgccagaggaagttgtgcaaaacggctatcgccaggacttatggcaatgacgacacgtttcacccggggatgcgccagcagcgcatgcacgctgtgttcaagaatggtttgattaccgatactgagatattgcttaggacattccgtttgcattcgacggccaaatccggccgccggaaccacggcgcaaacatccaaatgagtggttgccatgttaattcccgggctgatttatcgattgttttgccccgcagactgtgcgcgcttgctcgcgtcaggcaccagacgataaaaagtttcgcccggcctggtcatgctgagttcattacgcgcacgctcttcgagcgcctcctggccgccattgagatcgtcaatttcggcaaaaagttgatcgtttcgcgctttaagtttcgcgtttgtagcttgctgtgccgccacatcatcattgacgcgggtatagtcatgtataccgttcttaccgaaccacaggctatactgtagccagaccagaatagccagcaacagcagcgttagtttacccatcctgccccctgaaaaacggcatcatcatcccatgcatccgaagacgactctacatcctctgttggggataccgcgacaacgcgggcaaatgtaccacatttgtccattgttacgtatacccagggcgtgcagaacataatctcattattagttacggtttgaattatgaacagaggagacgggaaagtacaaattagcccagtagccacataaacagtgcgccaaacataatgcctactgtcaccagggtgaaaacaatactgtagcgtagctttccgtccatcaaactatgcagcgcaatccccaccactaccgcgacgggcatcagcgccagaaagaaaggccaggtgtagataaagaagaacagcgtgttagagccataaatcaacatcggcatcgccagcgcaaataaccaggagataaaaccgaccacggcaccaggcagactccatgtggtttcttcatcctcagtaaggctgtcgttatttgttagtgtaatgttatggctattacgcatatttgatcctgttactttgacgaaccgggcatggaaacccggtggtgtctcaggatctgataatatcgttctgtctcaacagatctaataattgctgtaccaaatttgttactaattgttcaccattgagatgaatttctgcgctttcaggcgcttcgtaaacggaatctattcccgtaaagttgcgcagttcaccggcacgcgctttcttatataagcctttgggatcgcgggcttcgcaaatcgccagcggcgtatcgacaaacacttcgataaagcgcccttctcctacgcgttcgcgaaccatctggcgttcggcgcggtgtgggctgataaatgcggtcagcaccaccagtccggcttcaaccatcaaattcgccacttcaccgacgcgacggatattctctttacgatcggcatcgctaaaaccgagatcgctgcataatccgtggcgaacattgtcgccatccagcagatacgtactgacgccgagtttatgtaacgcctcctccagcgccccggcgaccgtacttttaccggacccggagaggccggtaaaccacagcactacaccacgatgaccgtggtgtagctcgcgttgttgcacagtgaccggatggctatgccagacgacgttttcgtcatgcagcgccattatttatcccccagcaaatcgcgcgcgccccagtgcggaaagtggcgacgaaccagagcattcaattccagttcgaatgcactgaattcagatggcgcagcagttgcctggctaactggctcgtgcaccataccggcacccacggtcacattgctcaggcgatcgataaaaatcagcccacccgtcaccggattttgttgataacgatctaacaccagcggctcgtcaaaagtgagatccacgaggccgatcccattcagtggcaggttttcaacttcacgctgggtaaggttattaatatcaacctgatagcgaatgccatcaacacgcgcgcgcgtcttcttaccggcaattttgatgtcgtaactctgccctggagaaagcggctgttccgccatccataccacatccacgctcgcgctctgcaccgccggtaacgcttcgtctgccgccagcagcagatcgccacggctgatgtcgatctcatccgtcagcaccagggtgatcgcttctccggcaaaggcttcttcgcgatcaccatcaaaagtcacgatccgcgcgacgttactttccacaccagagggcagcactttgacacgttgcccgacttccacgcgaccggatgccagcgttccggcgtaaccacgaaaatcgagattcgggcgattaacgtactgcaccgggaagcgcattggctgagcatccaccactcgctggatctccacggtttccagcacttcgagcagtgtcggaccgctgtaccacggcatactttcactttggcttgccacgttgtcgccttccagtgcagagagcggcacaaagcggatatccagattacccggcagctgcccggcaaaggtcaaataatcttcacgaatacgggtgaacgtctcttcactgtaatccaccagatccattttgttgatcgccacgaccagatgtttgatccccaacagtgtggagataaaactgtgacgacgggtttgatcgagcacgcctttacgggcatcgatcagtaagatcgccagttcacatgtgcttgcgccagtcgccatattgcgggtgtactgctcgtgccctggggtgtcggcgataataaatttacgcttctcggtagagaaatagcggtaggccacgtcaatggtgatgccctgttcgcgctcagcttgcaggccgtccaccagcagagccagatccagcttttcgccctgggtgccgtgacgcttactgtcgttatgcaggctactgagctgatcttcgtagatttggcgggtatcgtgcagcagacgaccaatcagagtacttttgccgtcatcgacgctaccacaggtcagaaaacgcagcaggcttttatgttgttgcgcaatcatccaggcttcgacgccgccttcattggcgatttgttgtgcaagtgcggtgttcatcttaaaaatacccctgacgttttttcagctccatagaccccgcctggtcgcggtcaatcacgcggccctgacgttcactggtggtggaaaccagcatctcttcgatgatttccggcagtgtttgtgcattactctccaccgcaccggtcagcggccagcagcccagcgtacggaaacgcaccatccgttttttaatcacttcgcccggttgcaggtcgatacggttgtcatcaatcatcatcaacataccgtcgcgttccagaaccggacgttccgcagcgagatatagcggaacaatgtcgatattttccagccagatgtattgccagatatcctgctcggtccagttagagagcgggaagacgcggatgctttcgcctttgttaatttgcccgttgtagttgtgccacagctccgggcgctgatttttcggatcccagcgatggaagcggtcacggaaagagtaaattcgctctttagcgcgggatttctcttcgtcacggcgcgcaccaccgaaggcggcatcaaaaccgtatttgttcagcgcctgtttcaggccttcagttttcataatatcggtatgtttcgcgctgccgtgcacgaatggattaatccccatcgccacgccttccgggtttttatgcaccagcagttcgcagccgtaggctttagcagtacgatcgcggaactcatacatctcgcggaatttccagccggtatcgacatgcagcaacgggaaaggcagcgtacctggataaaacgccttgcgcgccagatgcagcatgacgctggaatctttaccgatagagtagagcatcaccggattactgaattctgccgccacctcgcgaataatgtggatgctttccgcctccagttgccgcaggtgagtaagtcgtatttgatccataaccgttcctttgcaataccgctattttcttgccatcagatgtttcgactatagggagcgtaagagaacgaatgaaattaccaattagaatgagtagttccttaacggaataacgatttggcaaagctaatatcaaaaagtgcttaaggcaccggatttcgggcgtttaggaagatttgaaattgttttagcgcagcggcagtttcatactatggcggtaaaaaaatttgcatggtatttaaggactcactatgttttccgcattgcgccaccgtaccgctgccctggcgctcggcgtatgctttattctccccgtacacgccagcagtcctaaacctggcgattttgctaatactcaggcacgacatattgctactttctttccgggacgcatgaccggaactcctgcagaaatgttatctgccgattatattcgccaacagtttcagcaaatgggttatcgcagtgatattcggacatttaatagtcggtatatttataccgcccgcgataatcgtaagagctggcataacgtgacgggaagtacggtgattgccgctcatgaaggcaaagcgccgcagcagatcatcattatggcgcatctggatacttacgccccgctgagcgatgctgacgccgatgccaatctcggcgggctgacgttacaaggaatggatgataacgccgcaggtttaggtgtcatgctggaattggcagaacgcctgaaaaatacgcctaccgagtatggtattcgatttgtggcgaccagcggcgaagaggaagggaaattaggcgctgagaatttactcaagcggatgagtgacaccgaaaagaaaaatacgctgctggtgattaatctcgataacttaattgttggcgataaattgtatttcaacagcggtgtaaaaacccctgaggcagtaaggaaattaacgcgcgacagggcgctggcaattgcgcgcagtcacggaatagccgcaacgaccaatccgggtttgaataaaaattatccgaaaggcactgggtgttgtaatgacgcagaaatattcgacaaagcgggcattgctgtacttagcgtggaagcgactaactggaatcttgggaataaggatggttatcagcaacgcgcaaaaacacctgccttcccggcgggaaatagctggcatgacgtaagactggataatcaccaacatattgataaggctcttcctggaagaatagaacgtcgctgccgtgacgttatgcggataatgctacctctggtgaaggagttggcgaaggcgtcttgatgggtttgaaaatgggagctgggagttctaccgcagaggcgggggaactccaagtgatatccatcatcgcatccagtgcgcccggtttatccccgctgatgcggggaacaccagcgtcaggcgtgaaatctcaccgtcgttgccggtttatccctgctggcgcggggaactctcggttcaggcgttgcaaacctggctaccgggcggtttatccccgctaacgcggggaactcgtagtccatcattccacctatgtctgaactcccggtttatccccgctggcgcggggaactcccgggggataatgtttacggtcatgcgccccccggtttatccccgctggcgcggggaactctgggcggcttgccttgcagccagctccagcagcggtttatccccgctggcgcggggaactcaagctggctggcaatctctttcggggtgagtccggtttatccccgctggcgcggggaactctagtttccgtatctccggatttataaagctgacggtttatccccgctggcgcggggaactcgcaggcggcgacgcgcagggtatgcgcgattcgcggtttatccccgctggcgcggggaactcgcgaccgctcagaaattccagacccgatccaaacggtttatccccgctggcgcggggaactctcaacattatcaattacaaccgacagggagcccggtttatccccgctggcgcggggaactcagcgtgttcggcatcacctttggcttcggctgcggtttatccccgctggcgcggggaactctgcgtgagcgtatcgccgcgcgtctgcgaaagcggtttatccccgctggcgcggggaactctctaaaagtatacatttgttcttaaagcattttttcccataaaaacaacccaccaaccttaatgtaacatttccttattattaaagatcagctaattctttgttttcaaacaggtaaaaaagacaccaaccttaaaccatccaaatctaccggggtacgcctgtttaacccaaatgtctggaactcaaatcccgtttccgtattcgttgcccatgccatcactacattgccttcttccgccagtccagctatttgttcccagatcatttcacgaatttttgcggatacatcacctacatatacccctgcacgtacctccaacaaccagatggctaatctgcctcgtaagcgcggaggtacattttcagtgaccacgaccaacatactcatttcagctactccgatggcctgcatctcccagactaacaggaagcggaatggcaacaggctgtgcatcttcaggtggggccggcggttgtatttctccagcggcaagcacgtcctctataagcggaatcaatttggctaatgttttactactgcgaaaaatatccctgcacgccaaacggacttcccggtccggctcaccagggttacgacgcgctatctcaaaagctttcggtacaacagtgtcaaatttaatgatgtctgcaatatcgtaaacaaaggaaagaggctttcctgtatgcacaaacccaatagctggtgcataaccagctgcaagtatcgccgcttcagttacgccgtataaacaggaagttgcagcgctaatgcattggttgatcgtatcgcccttttcccagtctttcggatcgtagcgacgtccattccatgtcacgccgtattgcttcgccagaagtgcgtaggttgcccgcacgcgactgccttctatacctctgagttgctctacggagcgccgggcaggcgcaggttctccaaaccgaagttcaaacattttacgtacgaccttcagacgcaaatcttcatccagagcaagttttgcctgatagagcagcttatcactacgcgcacctccaggctgaccagaagcataaacacgaacgcccgcttcccccacccataccaacaatgttccaacttgcgcagccaggcgtacagctgcatggctaacccgtgtaccaggttccagcatgatgcaggcaacgctgccaacaggaatatgagtgcggatccctgtcttgtcgataagtacaaacgcgccatctattacatcgatctgcccatattgcagaaagatcatggagacgcgatctttgagtggaatgggattaaggggaagccaggtcattttattacacctcaatcacagtggagccaaagatagcaagccacatcccatgcttttagctggcccaataccttgctgtacaagatctattaacgctggcgcgtcgttgatggtgagcacaccttcaaagcaaaccgtttggatctttccacttttaccatcaccagaaaaatactgtggccgttcgcttatgggatgcacatcttcaacgcgcgccgcattgcccaatttacgttgcaaccacgcgatttgttctgcttcttttattaacggaacccgacagcgtttaatattccctttactgtccaggcgcttttgattgtcgagaatagttttgatcggatttgcccgaagccgaaaatagagtggaacaccaacctgaagttgaaattcaacctgtttagttttaatgactgtcgcaacggcagtactaacaggcatttgcgcactctgcaataaaacatgacagccttctggtgtgtttcgcttctcaacatgaaaaagaaaatcacgagcagcatccggtctgtttggaaataaatgccataatccctggtgaagttggtaaagatccctgctccaggccctggcaatgatgactttactgagatacatccatacctcctttaatcacataccattctcgggaagcaaattgtcgaggcaaggtgatcatcggttcgtcgcgcgccgtaaattttaaatgatgccctgtaacactttcctcactatatatatcgccgccaacgggctcataatttaatagcgccttctgaggatcgcttgcctgacatgtccccaaaaaaagcgggtgtgttagtgggcaacttctccgccccaggtaaggtgtataccgaggctttaatactgctttttcaagttcactgataaccatcgttgcatggggtgttaaccagagagcgacggtaaaggaggcatcacataaatattcgcgccatgtttgaatcgtttcatgacttttcaaaccacggtaatcttctcgcgctccaaggactgtatggtaatcacgcaaccccgttacagacacacgacgatcgtcaagaatgagttcatcgcagcgcactgcaaattgcacactctcacttaacgcctgtaaactagaagtatcatcacgttggatcccaagacaagccccgagtagccctaataacccgcttcgggtcggaaatcttccggtaggtcgcgttccttcaaaggtcggctgcccccaggcttgcattggcccagcaagccgcaagatcaaataagatctcatgttcacgcctcgccattattacgaacccaggattttaactgttctaaagtaggcatttgtttaacttgagcagtaattgggtctacatcagataagctgaattgcgcagcagctccgttcagaccatatccattggcaacgcgatcccaatattgattaaacgcctgtatagacggttgcaaaaagccatctttcgctttaaccgctttttcaaaagcatttgccatagaaagtggcatatcggagaaattaaccattaccatatccgcagggttaaaagcggcataagtacgctgttttgctccagggacctctgttgccagcatatgaacaacatgggttgcaatttccagagcctgctccctggaggcaccacctaaattttcctgaagttgagcgaggttaatgttggcataacgataaaaaacaccgctactaaattcctgagttcccagatgtgcagaaccttgttcctgtaaatcatctacagcggtgaaccagtcaatatcagaatcaacctgatgagtagtgatcgcatgcgcaatggacattgcaccatcaacttttcccaactcagtcatcatgccgctggttgccattcttccactaagcgcaatatcaacaccctgctgtaaattcacacgtatggcggcaatatcttccttaagaactttgagcagctttttatcatccagattatcagcctctgcttttgcaacctgctcacagaaccaggctatttctcccacaacccagggagtaaccgcatcggcagaaatcttttcggcttcatcaacacttttaccggagagcagcgctaatgtcttatcgatgattttttggtcaaaacgttcaccaagtttttgccgaagaacatcacgtaattgtgcaagatgaatggttctgagactggattcaccaatattttgtgcgtaataaccacttttacgcatcgcacgtttaaggctttgactactaattcttactcgtcttttgccgccgaaaatagcgtctttctgcatgttcatatcgtcgcggttcagacaactagggctgtgagagatcagaacatgaatattgataaagttagacatagaaaggtttccttacgcatttttgtttgtggtcaatacaaaatcttccagaagttgctggcgttcgcgctttccccaccaggtcaacatcctggccattaatggccagtcaagtacgggttcggcgtgagtaagtaatcgacgtaactggaccatatcggctgttctgtcagcccgaattaattgaaagatacggcgctcgttaattcttccactattggctaaagctcttcccaagctgatacctgttgtttgctcgctttttttgtcctgatgtcggatgacattctttcctgcgctcaggcaaaacaccatgcgcaaaagagcctgctggtgacgtgggttttcccaaccaaaaggttgcaccagcctataaaacgcagggatatcgcgtaattcatcaggttcactaacacgtctaatttgcgcacaacttccattatccagttgttgccaggctcgatataaagccattgcatcaatttcatcagccattacttggccctccttgcggttttaactcccgtaaatgtttgtatagcgtggcgcgggcaagcgctaatgtgcttattaatttaggatgatgtgcatagggagctacagattgattaaatagcatttcacacaattgatgaagtttgtctcgtaaatcagctattacctcatcagcctgggaaaaattaacattcgccagtacatcgggaattaataattcactctgtcgatagaaatgcctttctgcagtctcatgaacagagactccggcccctttgaagtctttatttttaaacccttctgcaaaggtatataacgccttgcgtaaggctgttttatatcccaaaccaacagtcactatttcgtttatcacattgccgtattgttgccacccctgattaaacatcaacacatcatgacgccgttcaagaatagatgcttgattattacgatatccccccataatcaattcaagaggactttgcggcgcaatatttctgaattgattcacaaccgccgccacgcgatttccattttcattttgaataatcttatctaccacaactcggctgatttgtgtccaacttggtgcggaggtggtgaaagcaagaaatttttcctcaacctcccctttcttgactgttaccagacaaggggaatgcggatggggccatagcccattaactgtaaaggtaaatttttccttaagaaaaccggtataacgcaaattgctttcctgtccacagcaagaacatttaccaatcccaatgggatcgcataattcaatatgcgctggttgccagaatagaccacggacaaacccaatactgctagcaggtatagactcattggacttgataggtttaatccaggtaggttggttttccgtatgactttcattaggaaattgtttttgaagacgaggtaatgtgaggacattgagtaacaccgtactacgaagatcgatcccacgtacgaacgttgttacaggtgttcctccacgtaaaccgcttttaaaaccaccaccaaaacctggtgcctgattcgcctggttgaataacgcaatcgcagtgcatccaccacataatgcttcaccctgccccggttgattgacaaatgcacaattcgtcgcgccgcttaccccagccaacagtttttccattggagtcacatcatttgctttgacacctttggtctgcataaagggatgttctgcgtgattaaggtagaacatatctatccacggcgcgatgagttgttgaaactcatcttcagtgagcggattcattatgcgatgtcgaaattcaacgtcatcttttgccggggcgataatttgcccaatgcaaaccagcagtgctaaagcggccagttccatatcgtcacggggcaaacttaatcgccactgatctctactgcagtataggctttgcagatttatgatttggactttccccccgtttcgcgggcgtacagggatccagttatcaataagcaaattcatttgttctccttcatatgctccgacatttctcctgcatttctatacgtcggcacacttccgttatcggtaaaaacaaagaaaaaatacggcgtaattaattcaataatcacattcactgcaaaaatatattcattggtttaatacaattaacctatacatatattaagatgtgttgaattgtttaaagacaataatgcatgcatttcaaatctgcaagttattcgttttattattaaagaaacttttagttataataattaccatgaattttattacataaaatattcatactgtgaatataaaatctcataccgggaaattaaaagaagatgtacattgtgcaccttccctacttaagtagggataaaccgttattggtcttattatcgtcattgataacaatcattcccgaagttatttgggatttgcagggatgactctggtcatcccttcatcccctgtataggtaataacaatactgttaccctgccagacccatccatccagattctgtttcccttccagccaaagtaacccatcttcatctactacttcagaaaaactacgtttccaggtgaagggtacattgacgcgattaagtgcaagcgcctcatactgctgttcatgacttaggtcctcgtagacctggccatcgagcagttgtttaccactagacgtttgtacataaggcaataatggcaggctcatttccccatccctcgttaccgcaagaatggtttcatcgttatcctgcaagctatattcttcagcccactgcaggaccttgcgagccttgaaccttttttcacactcggcgctttcaaatttatccatgccattgccgacccattctggctcatccatttccgcatcatcgtaaatgctatccagccattgccggtaagcatcagggaaaaataaggatgctccattaagctcctcaatatgttgctgcgtccgccacatgactctaacgttgctataaatatgctcatgtcgtccgtaaccctcgccatcaggcagcaaaatggtggcaacaggaatctcaaaaccagcgggacgatatttgcgatgatggcgatgtaaacggcccaatcgttggaaaagcaaatctgcaggacaatgctgagtaattaaccaatcaaaatcaacgtcgagactttgttccacgacctgggttgcgacaagtatccgtccaacatttcgcttcccatttttgccgaaattgctaataactcgattctctttttcacgacgatcgttcagcgtaaagcgcgcatgaaacaaatctatatctacttgcgtgttatttagctcctttagccgttggtagcatacttgtgcaacgtcaaccaaattgcaaataagacagacctgtgcacccgcgtttgccgctgcgatcattcgctctaacatcgtaaggtcaggtaacatgtcagctaaacaaataggttctggctgaatgctaaagcggggcgggagttgttctggatgagctagcagatcaaaacgttgcgcaccattcacacctcgccagttaatgagtggatatgcggagttattttccactggatctgtatgcagaccataagtatccagaagtttctgtttttgtttcattggtagggttgcggaaagaagaataacactccctcccacatcagcctgagccttgagcactgcctccagcaagccgttcatataggtgtcgtaagcatgaacttcatcaacaattaaaacacttcgaccaattcccaaaccacggataaagcggtgtttaactggcaatacgcttatcaacacctgatcaatcgtgcaaacgccgatttgcccaagaaacactttcttattgctttgactcaaccactgacaacactgaacccacgcttcttcttgcccctgttcagtaatcgcgcgactttttatactttgaaagaggtggttaaaccgactattgccatgagcaagaataagatttggggaactaaataagtggctcgcgctcgcttccattctcgtaagcatagcattcgcggtagcttgtgttgggagggcaaaaataacactatccgcaatttgttgatcaataagtttccaagcataggccagcgctgtttccgttttaccggagcctgtaggtgcctctattaccgtcagcccgggagctactggaagagcatcaactaacacctgtaattgtctgggttgatagccattgtccagtagtgcatgaacaccttcataacatcgcttattacttacaagtccactcaactccaatacccggctcgcatcctgctgtcggtcctggaaatacgttctcagagcatttatgtcggaaggcgcatcctcattaaacagaaaggtattcgttgtagtccaggagcctaaccagtcagcaaggctgcaaaaacctgctaacagactactacaatcaggtggtatatcgtttatagataaccccgctggcgttaaaaataatgcttccagtacagatatccactcctcacgagcctgtttatcttgcgcagcataagatgccagagaagctggcatttcccaacggctcttatcttgatcctgggaatgtaatataaaaccatgatgtcctgtaacggcctctacccatggaaaccaggactcataaggatgaggagcggcatcaaaaaaactgaaaaaatccccgagagattgctcactaagactatcctggttaaaccaatacagaccggctgcaccatgattaaatttacggcacatttgtgtacttggaccattaagacttggcgttgcaggatttaatttcagccaactttctgcacttttatattggaatcgtatatcaaactttccaatatcatgaagagcaatgaaaaataacagccaggccttcaccctctgtttacttagcatttcatttcggcaaaaagtattttgcagtacgacactttgatcccaccagcaatctgcaacagcagcaacatcaaggcaatgataaattaacagatgaatatcatttcctttcgtcaagcttttactggattttccccagtaatggcatatatatttaaaaggttccattaatagcctccctgtttttttagtattatcgatgatatcagcgggctatttttcgatgctgctcataaatatcgaattacagtgatatacacatgtcttgcctccctgcaaagaagagactaacattcgaattgtttgggttcgaacgctggcctcaggttgatagaaatatcgcctggggcttttgtccatctggaacctcgcgaatgcttaacgccagacagcctcaagcacccgacgccattctatacctgataattcttcccgcggcgttcacgtttaaaatcaggaatgctgctcgcaaaataaaaacgcccccatcatttctgacagaggcgtttaatttgtccggcaatatttacccttcgtgtaacccacattccctttttaagccaaagaaacgcgtttcttcttccgccatgccgggttcccatttacgggttgtatgggtatcgcccacgcttaaatatccttcatcccataatgggtgatatttcaggccatgtttttgcaggtactgataaatagttcggttatcccagtcgataatcggcagcactttaaatacgccacgctgaattgccagcaccggtaaattggcacgactgccggattgttcacggcgcaggccagcaaaccaggtttgcgcattcagttctttcagagcccggttcatcggttcgactttgttgatgtcattgtacttttcaatgccttcaacgccctgctcccacagttttccgtagcgtgcttcctgccaggctgcgctttcggtagcacggtacactttcaggttgagcttgagtttgtccgttaactcgtcaataaagcggtaggtttccgggaacaagtaacccgtatcggtgaggatcaccggaatatccgggcgaatttgattcaccagatgcaggctcaccgccgcctgaatgccaaagctggaagaaagtacatattcaccgggcagattatccagcgcccaggctacgcggccttcagcgtccagtttttccagttcggcgttagtttccgccagcgccagaatgcgatctaccttcggcagttcgttcagggcgtttagatcgagtttggacatagattcctcactgtttgccttgcctgatgcgacgctcacgcgttcttatcaggcctacaagaccgggctgatggttaatcccacaaatcacgcgccggatcgagcaccgggcgaatgatgcccgcacgcaccgtaaagtcgccgaagccttcacccgcttcgcgctctttcgcccagcgccctatcagttcatcaaggctcgccaggatttccggctcggtgatgttttctttatacatccgtgggatacgtgtcccaatgcggttgccgccaagatgcaggttgtagcgacccggcgctttacccaccaggcccacttccgccagcatcgcgcgaccacaaccgttcgggcagcctgttacacgcatcacgatatgctcatcgctgacaccatgtttcgccattaaattatcgatgttgtcgataaaagacggcaggaaacgctctgcttccgccatcgccagcgggcaagtcgggaaactcacgcaagccatgctgttttcacgctgcggcgtgacggcattcattaacccgctctctttggcgatcttctcgatcttcgctttctcgctttccggtacaccggcgatgatcagattctggttcgccgtaatgcggaaatcgcctttgtggatcttcgcgatctccagcaggccggttttcagcggacgcgccggataatcaaggatgcgaccattttcgataaacagcgtcaggtgccagttatcatcaatgcccttaacccagccaatacgatcgcctcgtccggtgaactcatatggacggatcggttcaaatttgatccccgcgcgacgctccacttccgctttaaacgtctcaacccccacgcgctccagcgtgtatttggttttggcatttttacgatcggttcggttaccccagtcacgctgagttgtcacgacggcttcggccaccgccagcgtatgctccagcggcagatagccaaactcactcgcggtgcgggcgtaggttttcttgttgccgtgttcgatggaaagcccaccgcccaccaacaggttaaagcccaccagcttgccgttttcggcgatcgccacgaagttcatgtcgttggcgtgcagatcgatatcgttctgtggcgggatcactaccgtggttttgaatttacgcggcaggtaggtctggccgaggatcggttcttcatcagtagtggcgactttttcctggtcgagccagatctccgcatacgcgcgggtacgaggcaacagatgctcagaaatcttcttcgcccactcgtacgcttccgcgtgcagctggctctcgtaagggttgctggtgcagagtacgttacggttcatgtcgttagctgtcgccagcgcatcaagaccgacgctgtgcagcatctggtgcaccggtttgacgttctttttcagaatgccgtggaactgaaacgtctggcggttggtcaggcgaatgctgccatagatggtgttttcaccggcaaatttgtcgatcgcctgccactgtttagtggtaatcaccccacccggcagacgacagcgaagcagcatcgcgtggcgcggctccagcttctgttcagcacgttcggcgcggatgtcgcggtcatcctgctgatacatgccgtggaagcgaatcagcaggaagttgtcgcccttaaagccgccggtcagaccgtcgtttaaatcttccgcaatggtgccgcgcaggtagttgctttcatgcttcatgcgctcggcgtctgtcagttttccttcgaccactaaaggccctggatgtttttcgctcattagtagacatctcgctgataacggcgctctacgcgcagctcacttaaaaattcatccgccgcttcggtgtccatgccaccaaattcggcaatcacttccagaagtgcctgctcaacgtctttcgccatgcgattagcgtcgccgcagacataaatgtgggcaccatcattgatccagcgccacagctccgcgccctgttcgcgcagtttgtcttgtacgtaaactttttctttttgatcgcggctccaggcaagatcgatacgtgtcagcacgccatctttgacgtagcgctgccactccacctggtacaggaagtcttccgtaaagtgcggattaccaaagaacagccagtttttacctggcgcttcgtcggcggcgcgttgctgcataaaggcgcggaacggcgcaataccggtgcctgggccaatcataatcaccggggtttctggattggctggcaggcggaagttatcgttatgttcgataaatacgcggacttcgccctcttcttccacgcggtcagcgaggaagctggaggcaccaccggcacgggcgcggccttccacgtcgtaacgcaccacaccaacggtgacgtgtacttcgttctcgacttccgcctggctggaggcgatggaatacagacgcggcgtcagcgggcgcagcagattaattagcgcttcggcatcaagctgtgccggggagaaacgcaccatgtcaacaatcggcgtcgtcgcggcgtaatgctgtaacttcgctttatcgcccaccagcggcagcagtgtttcactgcgggtaagcgtggcgtaattctcaacaatgttggcggtgttgacggtcagttcgaagtgccactgtagcgcttcgttcagaggcaacgttttgccctcgacggtgacaggttcatcgcctttcagccacagcagttcgacaagttctttcaccagtgccggatcgttctgataccagacgcccagcgcgtcacccggctggtaacgcatgccgctgtcacctaagtcaatttcgatatggcgaacgtctttttcagagttacgcccggtaattttctggttaacagagaggctagccaccagcggcgcgtctttgctgtacgggctggtgtggatttcatttaccgcgccagtagcgacggattggctaggtgccgcgacaggcgcacggcttttaagcgcatcaaccacgcgggcgcgccactcgctggcagcagcctggtattcaacatcggcatcgacacggtcgagcaggcgttcaccacccagttccgccagcttgctgtcgaaatctttcccggactggcagaaaaattcataagagctatcgccgaggctaaacacggcaaacgcggtgttttccagctttggcgcttttttggagaacaggaacttatgcagcgcgacggcttcttccggcggttccccttccccttgcgtactcgtcactacgatgagcagtttttcgctggcgatttgtttgaatttatagtcgcccgcgttcaccagcttaacgttcagttttgctgctaataaatcatcacgtaatgcttcagcaacccggcgcgcattgccggtttggctggcggagataatagttatacccggcatttctgcggctggcgctggcgtcgctgcaagcgcagcaggctgctgattgagtacgccccagaaatagccagaaacccaggcaagctgggtgggagttaaatcggtcgtggccgcctgaaggcgtgccagttgctccgggttcaacggaagcaacgcggaaggtgggacctgtgtcgtcatgcgtcgttatgttccagtaagcaaagctgtttctgcgccctgtcagcgcccataaaacagaagagaaggtaaggttaacggggcaaacggtgtggattaaagacgggatagcgataactaataaccaaatcgactaacctgttttagcaatagtctttaacaacaaaatagattaaccaacctaatgaaaaacaaatgaatttagccaatcattaagataaatcagcgattttgcgcaacaaagtcgttttagataatgcgaaaaaacagcctttccggtactctacggcggttttatcgtcctgtagagaaattatgatgtccaccacgttatttaaagatttcaccttcgaagccgctcaccgcttaccacacgtcccggaagggcataaatgtggtcgcctgcacgggcattcctttatggtgcgactggaaattaccggggaagtcgatccgcatacgggctggattatcgatttcgctgaactaaaagcggcgtttaaaccaacctacgagcgcctcgatcaccattatctcaatgatattccaggtctggaaaacccaaccagcgaggttttagcaaaatggatttgggatcaggttaaacccgttgtgccgctgttaagtgcggtgatggtaaaagaaacctgcaccgcaggttgtatctatcgcggcgaatgataagagtgtgtcggcggtcaatttcccttaagtaacgctatgttagggtgttgtgttctggatatctggggcatgacatggaagacgactgcgacattattattattggtgccggtattgcaggcaccgcttgcgcgttacgctgcgcgcgagcgggtttatccgttttgttactggaacgcgctgaaatccccggcagcaaaaatctttccggcgggcggttatatacccatgcactcgcggaactcctcccgcaatttcatctgaccgcgcctcttgaacgacgcatcactcacgaaagcctttccctgttaacgcccgatggcgtaacgacgttttccagcttacagcccggcggtgaatcctggagtgtattacgtgcacgattcgatccgtggctggttgccgaagccgaaaaagaaggtgtcgaatgcatccccggagcgacggtggatgcactgtatgaagaaaacggcagagtctgtggcgttatttgtggtgacgatattctccgcgcccgttatgtggtgctggcagaaggtgccaacagcgtcctggctgaacgtcacgggttagtgactcgtcctgctggcgaagcgatggcgttggggatcaaagaagtgctgagcctggaaacatccgctattgaagaacgttttcatctggagaataacgaaggcgcagcgttgctgttcagcggcaggatctgtgatgacttacccggcggcgcatttctttatactaatcaacaaacgctcagcttagggattgtttgcccgctctcttcccttacgcaaagtcgtgttccggcaagcgagctgctgactcgctttaaagcgcatccggcagtgcgcccgcttatcaaaaacacggaaagtctggagtatggtgcgcatctggtgccagaaggtggcttgcacagtatgccggtgcaatacgccggtaacggctggctgctggtgggcgatgcgttgcgcagttgcgtcaataccggaatttccgtgcgcggcatggatatggcgctgactggcgcgcaggcggcggcacaaacgctgataagcgcctgccagcaccgcgagccgcaaaatctgtttccgctttatcatcacaacgtagagcgcagcctgctgtgggatgttctacagcgttatcagcatgttccggcgcttttgcaacgcccgggatggtaccgtacgtggcctgcgttaatgcaggatatttcccgcgatttatgggatcagggtgataaacctgttccaccgctgcgccagttattctggcatcatttacgtcgtcacggcctgtggcatctggcgggcgatgttatcaggagtctgcgatgtctgtaacgtaagatgttatcaggagtctgcgatgtctgtagcccgtaatctctggcgcgttgctgatgcgccgcacattgttccggctgactccgttgagcgccagacggcagaacggttgattaacgcctgtccggcaggtctttttagcctcacaccggaaggtaacttacgtattgactatcgcagttgcctggagtgtggcacctgccgtttgctgtgcgacgaaagtacactacaacagtggcgctatccgccttccggattcggcatcacctaccgctttggataaataataaggataatttatgcccctcttacacctgctccgccagaatccggtgattgctgccgttaaagataatgccagcctgcaactggcaatcgattctgaatgccaatttatttccgtgttgtacggcaatatctgcaccatcagtaatatcgttaaaaagattaagaacgccgggaaatatgcttttattcatgttgatttgctggaaggcgcgagtaataaagaagtcgttattcagtttttgaaactggtgaccgaggcggacggcattatcagtaccaaagccagtatgttgaaagcggcaagagcggaaggttttttctgtattcatcgcctgtttattgttgatagtattagctttcacaacattgataagcaagttgcgcaaagcaatccggattgtattgagatcctgccaggctgtatgcccaaagtgctgggctgggtgacagagaaaatccgccaaccgctgattgccggtgggctggtgtgcgatgaagaagatgcgcgtaatgcgattaacgcgggtgtcgtggcgctttccaccacgaataccggggtctggacgttagcgaaaaaattactttgacgggataatcgtaaccaattgaatttggtttgatttgtaggccgcacgccacatccgacattcagcgcctgatgcgacgcttgacgcgtcttatcaggcctacaagtccccaggccagaaccgtaggcaggatcatccggcaacacgttattggcaatctgcgtgaatgtttgtcaccagtgcctccagcaccactttccagtcatcaaccacgccaacatctgcctgactaaataccgcagcgctggcgtcatgattaatcgccaccacaaacttgctattgcgtacgcccgccattaacgctgctgcgccagaagcgccaacaacaatacacacctcaggtgccagcagatgtccggaaataccaatcactttttcagcatcaacgccaccgttcatcactcgcgcccgactgtagcccacttcggctcccagcttttctgccagcatagcgatttcctggttatctgcctctccgccctgccccaccaccagcacccgtctggcctcagctaatgggtcgcgggtaacatttttcagatcctctgtgctaaccagccagtccggaagcgcacccgggacaatgttcagttgttgcattccagagggcaacgtggcgtttttcgctgctcccgcctgacgcgccagggaaaggcatagcgggcgtttttctgtttgcagcgtcgccgttagcgcatttccccagtgggatttgcgcacgcttacggttggaatatctaagctagtcacctggcagatgcttgcaccatgtaaacgccaggccagccgggtgctcagttcatcgccaaacgttcccggcggaaagagaacaacgtccgcaggcgttcgctgccactgttccaccaacgcatccagcacctgttccgccactacaggctgaggttcaatctgccagtgcgccagggtacaaccgctgaaatcctgcgccgccagccagcttgctattgcggcattctcctgatttattgtcacaattgcgatattcatggctgcatcctttggcgtaaatagtcctgccatagcttttgagctttttctgctaccgtttgcccatcaatcagcgtcgctccgcgtcgttgctctgctcttgccagttgcagacactgcatcgctggcatttcggcagcaacagttttacggataatttctgctttccccgcagccattcgctggcgcattcccggtactggcaaggccacttcaccgcactgacgcacggcaatcaccgcaggcaagcgaacccggcaacaacgcaacccatgttcagtacgctgttcgagggtgataaacagcgcgtcgagagtgaaacgctccacctgggtgaagcagggccagcccagcatttccgccagcaaaaatggcgtttgcccattctgcccttcgctgctttggcagccggtaattatcagatccagcggattctgatgctgccattcggcaatatggcgagcgacaaattccggcgcaaagcgcagatctgccgccgtctccagcaatacagcttcctcaaacccaagagccatgagatagcgcagccagtgcaatgcccgttcatcccccatgctcaacgcggttaaagacatcggcgtaccgttttttctctgcgccaacagcagcgcggcagcggcctgttcatcagcaccgagtaaacttcgcagtaggctaatatccggtccgcttttaccctgagccgccgcctgccactctttttccgccagcattccggcatccggttcggctttaaacgctaacagaatgttcattcgcacctcctacatttcccgccgccaccagcgggagggctttagtttctggtgcccatagccaggtcacaacaaaaccaaccaacaacactgtcgccaggagcaataaggtgacttgcattccccactgcgccagcacccacggcagcaggccagtacttaccgccgcgccaagtcgactcatggcagtggcaaaaccgacgcccaggctgcgaatgtcagtaggaaaactttccgcaggcaaaatgcccaccagattactgactgcgctaatggtggtgctgaagagaacaaaaagcagcagcgttaaactactgccggaaggcaaacaggccatgactaccagcgttgccgccagcagcaaaaaacttcccagcaaaaatttgcgatgtgccagcaggtgcgtcagaactaatcccagcagcgcgcccacaattaacaacgcattaagcatcaggctggcagtcagcgcatcttccagaccaatagtctgggcgatagttggcagccaggtataaatcacaaaccatgggattacgaggcagacaaagaagacgctgttaaacgccgtgcgccgccagtaacggctagagaacaaggttttgatgtgtttatgggtcgccgttaccacttcatcgcccagtaaaacatggggaccaaaatagcgatgcacgatagcgtgagcttctgcaaaacgcccctggcgcagtagccagcgtggactttctggcgttccccagcgtaataacgtaatcaacaacgcgggcagagctgcgcttgccagtagccagcgccaggcctccgggttttcggaaataaagtgatgtccggcaatacttgccagcacatagcctacggtccacaccacgctgaatgcgcccagcaaaataccgcgatggcggcgcggggaaaattcagccagcaaggtgtgacctacactataatcgcctcccagaccaatgccaatcaaaatgcgcagtccaataagatgctctggcgtggtggcaaaaaattgtaaaaagctagcaagcgtaatcagcaaaaagctgaaggtgaagattttttgccgaccaatatggtcggagatccacccaagaaccaggctgccaaggaacaaaccaaggagcgcgctgccgccgatcattcccgccataaacggcgtcagttgcatggcgggcgtaagctgaataatggcgtaaccaatgacgccgagaacataaccgtcggtcaggtgtgcgccgaaagtgagcgcagcaatgcggcagtgaaaacggttaagcggtaaatcatccattcgcaccggactagtgttcatctttaccccttcattgtccggtaataagaacggcttctcgcctgagaagccgaaaaggcaacgccccgtcatcgcggaacgctgcctgacacattatttttcaatcggatagatagtacccgtattcataatgccattaggatcgaactgctttttcagcccttccagcaacgcccacgcgctgccgtgttccagtttgctccagtgaacgcgatgtttaccgataccgtggtggtgcaccatgctaccgccgaggcgaatggtttcttcacagatgatcttgttgagcggattgtggtacttgtcgatttcctcttccggcttacagtcaacgacgttgtaatcgtagacgaagtacatgttggtgccgttctgatagctatgagaggaatgaccgcccagcatggtgatgtcgtcggcgtgcgggaactcagtacgaatacggttaataacgctttcgtagatttcgtggatgcagctccagcagccggatacttcggtggtaaagcccatgttgccggttttgaggatctgcacacgttcggcagccactttatccggtccccagttcaggttgttaaaccaggtttcgatcagcttgctgtccacgcgctggcattgcgggtagcgggcaacgatttccgcaatcccttcgcccgtcaccttcgcaatgcgagggttaccttcagccataaagatcagcacgcattttccgtcggcaaaatgggtgaagtgttgggtgccatcttcagcgtcatacaaacgagcgatactcggacgatacccttccaccatgatttcacgcaggatgttgaagccggttttcatgtcttccaggatatagccgtagaagaggttgttttccggggtgaatttaaagattttcactgttacttcagtgatatagcacaatgcaccttcgttgccgatgatgatgtgacgaatgtccgggccagccgcgcggcgtggcacgtttttaatgcgtgtgacggtgccatcagccaatactgcttccagaccaacgaccatatcttcgattgcgccgtagagtgtggagaactgcccgatacttcgggttgctaccaggccgcccatctgcgccagcggcttactctgcggagaatgccccgtggtgtaacctttttcacgcaacgcgttttccagcacttccagcggaacaccacattgcgccgtcgcctgcatattctcaatatcaatattaatgatttgattcatggcggagccgtcgagcaccacgctgttttctacaacagtttccagcccaccttcggtggcggaagcaccggtacgcggcacaccgttaattttgtgcgcattcataaaattcagcacacgggatacttgctctgtggaaccgagttttacgaccgctgccggaatcggcaaagtataaatgccatgaatatccggaaatttacgaaaacggtcaatactgtttttctttaatactgtttcatcggtaattacgcgatctgcaccaacaatttcctttagctggtcgacaatcgctgcgcgagataaagacatagtaattccttcctgataataaaaatggaataatcattaataagagaaaacagaaaccaccgttatgggttagcgcactaaataaccgccatcaaccactaataaatgcccgttgacataattgcttgccggacttgcgaggaatacggctgcgcccattaaatcctgagtatcgccccaacggtttgccggaatatgatcaagaacgcgctgattggtttctggattactgcgtgtcgccagcgtaatatctgttgcataatagccaggggcgataccatttacctgaatattatattgacctagttcatcacaataagctttggtgaacccggcaagagcatgtttagtggcagaatatgcaggactccattgtccacctaagtaagagaacaaactacagatattaataattttgccgcttttctgcgggatcataatttttgcagcttcatagcttaactcgaatgcggcggtcaggttcacatcaatcatcggatcccagtcggcacgaccgaagtccagcaccttattcagcttacaaataccggcattgttaaccagaatatcaactgtaccgaaacgctcacagcaagcagcgataatcttctgcggcgcgccttctgcggtgatacccacctgcatgaagtccacctcaacaccctgtttttcaatcatttcctttgtttcgccgttatctttgacgaaactaggaataaagatatttgcgccagctttggccaacgccatggcaaatgcctggcctaaaccgctattcccaccggtaacaattgcggttttacctttcagggagaaaaaatccatactgaacgcattgagagattcgatactcatagttagctccaatttccgtaaggcaaaaaaaaagaaaggtaacttcccccgcgagagggaagttacctttctcattatctctggtaactggagataatttttagcataagggcataactgctaatgtgatcgtaatcacagtgtgatattcgtattgtcaaataattttaaaaagcagaagcgtgattactctcacacaacacctctgctttccatgttatttattatttcaattactagagacctgagaaaagtaatccacctgaaagggcggcttacttttctcttttttttgtctattacaaatgggaatacgatatgcaacacaacagttatcgccgttggataaccctcgcgataattagttttagcggcggcgttagtttcgacctggcttatttacgttatatttatcaaattcccatggcgaaatttatgggattcagcaataccgagataggtttaataatgagtacctttggtattgcggccattattctttatgcccccagcggcgttattgccgataaatttagtcaccgcaaaatgattacttccgcgatgatcattaccggattactgggtctgttaatggcaacgtatccaccgctgtgggtaatgctctgtattcagatcgcctttgcgataacgacgattttaatgctgtggagcgtgagcattaaagctgcaagcttgcttggcgatcatagcgagcaagggaaaattatgggctggatggaagggctgcgcggcgtcggtgtaatgagcctggcggtgtttaccatgtgggtcttttctcgctttgcaccggatgacagcaccagcctgaaaacggtcattatcatctatagtgtggtttacatcttgttggggattctgtgctggttttttgttagcgataacaacaacctgcgcagtgccaataacgaagaaaaacagagtttccagcttagcgacatcctggccgttttgcgtatcagcaccacctggtattgcagcatggtgatttttggcgtcttcaccatctacgccattctgagttactccaccaactatctgaccgaaatgtatggcatgagcctggtggcggcgagctacatggggattgtgatcaacaaaatattccgcgcgctgtgcggcccacttggcggcataatcaccacctacagcaaagtgaaatcccctacccgcgtgatccaaatcctttccgtactcggcctgctgacgttaactgccctgctcgtcacgaactctaacccgcaaagcgtcgcgatggggattggcctgattttactgctgggattcacctgttacgccagtcgcgggctgtactgggcctgccctggcgaagcgagaacaccgtcttacattatgggcaccacggtaggtatttgtagcgtgattggattcctgccggatgtcttcgtttacccaattatcggccactggcaagacaccctgcccgctgcagaagcctaccgcaatatgtggctgatgggcatggcggcgcttggcatggtgattgtctttacctttttgctgttccaaaaaattcgtactgctgatagcgcccccgcaatggctagcagcaagtaagccaggaaaattacaggagaaaaatcatgagcaaaaaatacatcatagggattgatggcggaagtcagagcacaaaagtggtgatgtacgatctggaaggtaacgtggtttgcgaaggcaaaggcttattacagccgatgcacacgccagatgccgatactgcagaacatcctgacgacgatttatgggcaagtttatgttttgccggtcacgatttgatgagtcagtttgccgggaataaagaagatattgtcggtattggtctgggatccatccgttgctgccgtgcgttattgaaagccgatggcacgcctgctgcgccgttgattagctggcaggatgcacgcgttacacgcccttacgaacacactaaccctgacgtggcatatgtcacctcttttagcggttatctgacgcatcgcttaaccggcgagtttaaagacaatatcgccaactattttggtcagtggccggtggattataagagctgggcatggagcgaagatgctgcggtaatggataagtttaatatcccccgtcatatgctgtttgatgtgcaaatgcctggcaccgtcctcggacatatcacaccacaagccgcactggcgacacatttcccggcaggactgccggttgtttgtaccaccagtgataaaccggtagaagctctgggggccggattactggatgatgaaacggcggtaatttctcttggcacttacatcgcattgatgatgaacggcaaagcactgccgaaagatccagtagcgtactggccgattatgtcttctattccgcaaacattgctgtatgaaggttacggtattcgcaaaggcatgtggacggtgagctggctgcgcgacatgctaggcgagagcttaattcaggatgccagggcgcaggatcttagtccggaagatttactcaacaaaaaagcttcttgtgtgccgccaggctgtaatggtctgatgacggtgctggactggctgaccaatccgtgggaaccgtacaaacgcgggattatgatcggctttgattccagcatggattacgcatggatatatcgtagcatactggaaagcgtggcgctgacgctgaagaacaattacgacaatatgtgtaatgaaatgaatcactttgcgaagcatgtgatcattactggcggcggtagcaacagcgatctgtttatgcagatttttgccgacgtgttcaaccttccggcacgacgtaacgccattaacggttgtgcaagcctgggggcagcgattaatacagcggtaggtctggggctatacccggattacgcaacggctgtcgataacatggttcgcgtgaaagatatctttataccgattgagagcaatgccaaacgctacgacgcgatgaataaaggcattttcaaagacctaaccaaacatactgatgtgatcctgaaaaaaagctatgaagtgatgcatggggaattggggaatgtggatagcatccagagctggagcaatgcgtaagtgaggaaggccgggcgggaaactgcccggcctgaacatacctgaatggttatccccgctgacgcggggaacataagttcgacaacttaaaaaatgataacaagtccggtttatccccgctgatgcagggaacataataaaaactttaactagttcggtttatccctgtttttacaaggaatattaactacactcgatgtctttagaataaaagacaatacgaatcgcactttatcaattttcacttaaagtatgaactggatatctttattcataagaactattcatcaacagcgtatagaggcggttatgtaaaaccactcattagcctcaaaacaaagacaaacttccagatttattacttaaccaatgaataacaagcttaaaaaatatactgttattctaaagaaaaaattaacaggcattaattcaatattaaaaaaataatagattaaaatttcttaacgatttaagaatcatacaaataacactttgattaaatttaattttttgtatcgataattgtgaacctctctggcatggagaactattttgaacatgaggtgttacgtggatatgttgcttattacaagtactgctaatataaaaacttgagaaagagataacgggttatatggtggtttatccccgctggcgcggggaactcgacagaacggcctcagtagtctcgtcaggctccggtttatccccgctggcgcggggaacacctgttttcgcaaatctatggactattgctattcggtttatccccgctggcgcggggaacacgggcgcacggaatacaaagccgtgtatctgctcggtttatccccgctggcgcggggaacactggctctgcaacagcagcacccatgaccacgtcggtttatccccgctggcgcggggaacacgaaatgctggtgagcgttaatgccgcaaacacaggtttatccccgctggcgcggggaacacattacgcctttttgcgattgcccggtttttgccggtttatccccgctggcgcggggaacactctaaacataacctattattaattaatgattttttaagccagtcacaatctaccaactttatagtatcacacaaacaacacatccattatgttaaagagcacttaatccattgattaaaaaggtaaatatttaaaataactctatacaaactaaaatctaccaaactttaccgcaataattttcactccagcgaaaaattaatgccacagaatttgtagagaatgctaatgattagccctggatgggtaaaatggaggagttttcagaggcgacaaacaatataaatgagtagaagtctttacaggttccacccatttataacgcttataaatgtttaatcaggcaatatttagatatttatgtgtttgcatgctcaaacgccaattacgcgcaatgcaggtttcaatgcacaaacgtgtggcatcatccttttggctaatcggctgcagtgcaatgactcgcggtttatcatcggtcagcgttgccagtagttcatccagtgcttcaatatcgcgtacgcgccccactggatgcttgatttcgttggctcgctccagtgcctgactcaacacttcatagccgccgcgcatgttcagctttgggcttacggtaacccaggtattcggtgtgcagcgtacctcatgagtaccactggtttcgatctggcagctaaaaccgttcttttcgagcagatcagtcagtggcagcaaatcatgaatgcaaggctcaccacccgtaatcaccacatgccgcgcggtgtatccctggcgaccaatgacagccagcaaatcttcactgctcgcagccccccacttatcactctctttggtcttcgccagaatgctgaaaagggagacttcccgatcctcaagcttttcccaggtgtgtttggtgtcgcaccaggcacagccaaccgggcatccctgtaaacgaataaaaatggcgggaacgccggtaaagtaaccctcaccttgcagggtctggaacatctcgttaatcgggtactgcatagcattctctgtgaagtggataattgttaattattgcagatcctgccacaacaatcatgtcttattaacattctgttacaggcaggtttaaagaaaaatgcgaaacatatcgttaataattaaagggagtaacgtattatgtcagaagaaaataaagaaaatggatttaatcatgtcaaaacattcaccaaaattatatttattttttctgtattagtttttaatgataacgaatataaaattaccgatgccgccgtcaatttatttatccagatttaatgagaaatttataatgcgctatttcatactaatgttcactttcgtatgttcctttgttgcagcccaaccaactattgtcccacaattacagcaacaagttacggatcttacgagtagcttaaacagtcaagaaaagaaagaactgacgcacaagttagaatctattttcaataatacccaagtgcaaattgccgtattaattgttcccacaaccaaagacgagacaattgaacaatatgctacaagagtttttgacaattggcgtttaggagatgccaaacgtaatgatgggatactgatcgttgttgcctggagcgatcgcactgtccgcatccaggtaggttatgggctggaagaaaaggtaaccgatgctctggctggagatatcatccgtagcaacatgatacccgcatttaaacaacaaaaattagctaagggattagagctagctataaacgctttgaataaccaactcactagtcaacaccaatatccgactaatcctagtgaaagtgaaagtgcgtcttccagtgatcattattactttgctattttttgggtatttgcagtgatgttcttccctttctggttttttcatcaaggcagtaatttttgtcgcgcatgtaaaagtggagtctgtattagtgcaatctatcttttagatttattcctgttctccgataaaattttttccattgctgtattttccttcttttttactttcaccatatttatggtctttacctgtttatgtgtacttcagaaaagagcatctggtagaagttatcatagtgacaacagcggttccgctggaggcagtgatagcggcggatttagcggcgggggcggttcttctggaggtggcggcgcatccggccgctggtaactcaaccataaaaaatgccagcccggaggctggcatttttaaatcagataaagtcagtcttatgcctggcctttgatctctttacgaccgttgtacggtgctttttcgcccagagcttcttcgatacgaatcagctggttgtatttagcaacacggtcagaacggctcatagaaccagttttgatctggcctgcagcagtaccaacagccaggtcagcgatggtagcgtcttcagtttcgccagaacggtgagagataactgcagtgtagccagcatctttcgccatcttgattgcagccagagtttcggtcagagaaccgatctggttgaatttgatcaggatggagttagcgatacctttttcgataccttctttcaggatcttggtgttggttacgaacaggtcgtcaccaaccagctggattttgtcgcccagaactttggtctggtatgcgaaaccgtcccagtcagattcgtccagaccgtcttcgatagaaacgatcgggtactgtttggtcagttcttccaggaagtgagtgaattcttcagaggtgaacgctttgttgccttcgccagccagaacgtatttaccatctttgtagaattcagaagctgcgcagtccatcgccaaagtgatgtctttgcccagttcataaccagcagctttaacagcttcagcgataacagccagagcttcagcgttggaacccaggttcggcgcatagccaccttcgtcaccaacagcagtgttcatgcctttcgctttcagaacttttgccaggtgatggaaaacttcagaacccatgcggatggcttctttcacagttttcgcgccaaccggctgaatcatgaattcctggatatcaacgttgttgtcagcgtgctcaccaccgttgatgatgttcatcatcggaaccggcatagagtatttgcccggagtaccgttcagttcagcgatgtgctcgtacagcggcatacctttagcagctgcagcagctttggcgttagccagagatacagccaggattgcgttcgcgccgaatttggatttgttttcggtgccgtccaggtcgatcatgatcttgtcaatgccagcctgatctttagcatctttgccaatcagcgcctgagcgatcgggccgtttaccgcagcaacagctttggttacgcctttacccaggaaacgggatttgtcgccatcgcgcagttccagagcttcacgggaaccagtagaagcaccactcggagcagctgccataccgacgaaaccaccctccagatgtacttcggcttcaacagtcgggttaccacgggagtcgatgatttcacgaccgatgatttttacgattttggacattaggttttcctcaagtcactagttaaactgaaactccagacaaacaacgcgtacccagggtacgcgttgccgctctaacttttttacttacttcgcctgacgtttctggaactcgctggcggctttcacaaagcctgcaaacagcgggtgaccatcacgtggagtagaagtaaactccggatggaactggcaagccacgaaccacgggtgattcggaacttcgatgatctcgaccaactgatcatccccggaacggcccgcaacgcgcagacctgcatcttcaatctgtttcaacagcatgttgttgacttcgtaacggtgacgatgacgctcaacaattgtcggcgcattgtacagctggcgaaccaggctatcgtcaaccaactggcactgctgtgcgccgagacgcatggtaccgccgagatcgctcttctcgctacgaacttcaacgttgccgttttcatcgcgccactcggtaatcagcgccacaaccgggtacttacagtctggcacaaattccgtagagttggcgttctccatgttggcaacatggcgagcgtaatcaattaacgccacctgcatacccaggcaaatgcccagataaggaatattgttctcacgcgcaaaacgcgcggtcgtaatcatgccttctacgccacgatagccgaaaccgccaggtacgaggattgcgtccagacctttaaggatttcaacgccgcgcgtttcaacatcttgactatcgatcagtttgatgttgacgctgacacgattcttcagcccaccgtgtttcagtgcttcgatcacacttttataagcatccggcagttcaatgtacttgccgaccataccgatggtgacttcacttaccgggttcgcttcttcgaagataacctgttcccattcggacagattcgcttccgggcagtttaagctgaatcgtttacaaatataatcgtccagcccctgagatttcaacaggcccggaattttatagatggaatcgacgtctttcagagaaataaccgctttttccggaacattacagaacaatgcaatcttcgcacgttcgttcgccggaacagcgcgatcactacgacaaatcaggatgtcaggctggataccgatggagagcagctcttttacagagtgctgagtcggtttggttttgacttcaccagacgctgccatgtacggcaccagcgtcaggtgcataaacagagtgtgctcacggccaatttcaacagccatctggcgaatcgcttcgaggaacggcaaggattcgatatcacctactgtaccgccgatttctaccagtactacgtcatgaccttcgccaccttccagcacgcgctctttgattgcgttagtgatgtgcggaataacctgcacggttgcgccgaggtagtcaccgcggcgttctttacgcagaacgtcagagtagatacgacccgtggtgaagttgttgcggcggctcattttggtacgaatgaaacgctcgtagtgccccaggtccaggtcggtttcagcgccgtcttcagtaacgaacacttccccgtgttggattgggctcatagtacctggatcgacgttgatgtacggatccagtttcatgatggtcacattgaggccacgggcttcaagaatggctgcgagggaggctgcggcaatgcctttacccagagaggatacgaccccgccggtcacaaaaatatagttcgttgtcatgctgaacctgagaagttaggttgaaaagacgatggaataaccaagacgggaaagcagtatacccgaacatgacctgtgccacaaactttcattatccctcctcttcgccagcgcactattgaaatcaggagtgagaaaatagcccctttggggtaaatgtttttgacgcaaatcaagcgcttgtcatttaaaaaatgacacaaatggcgcttgaccgcgtaattcccttagagatcaatttcctgccgttttacctgttgccagacttcttccattgtttcgaggtcaacacctgtcatttccagtccacgcgcggcaacaatacgctccacttcgcgaaaacgacgctcgaatttttcgttcgctttttgcaatgcgatttctgctttcgtccctaaatggcgagccagattaaccgtggcaaacagcaggtcccccatttcctcctccagtttagcctggtcgacaacagcctgccgcgcttcgtacatcacctcgtcgatctcttcgtagactttatcgactaccggaccaagcgtcgtccaatcgaagccaacgttggcgcaacgtttctggattttttgcgcacgcattaaagccggtaaactacgaggaatatcgtccagcgcgctatgctgcgctttctgcgcgcgctcttcggttttgatttgctcccaacgggcaagcacttcactactgttttcggcagaactatcagcaaaaacatgcggatggcgacgctctaatttatcgctaatagcagcgcaaatatcattaaagtcaaagcgcccttcttcctgagccatttgcgcgtaaaacaccacctggaatagcagatcgcccagttcaccgcgaagatcgtcaaaatcttcacgggcgatggcgtccagcacttcgtaggtttcttcaagggtgtaaggcgcaatggtggcaaatgtctgctctttatcccacgggcagccgttttccggatcgcgcaggcgctgcataatagtgagcaaacggtcgatttgattcattgaattgtcctgaaaattgcgggtctgtcaggtggaaacctgtgaccagaatagaagtgagttagtaacattacccaatcagtacgttaattttggctttaatgagttgtaattcctctggggcaactgttcctttcttcgttgctcctcttgcccgccaggcgatactttttacctgatcagctaacgctacgccatcacgttcctgaccggataaaacaacttcgaacggatatcctttactttgcgttgtacaaggaacacacagacacatacctgttttgttgttgtacatgaaaggactcaggacaacagctggacgatgtccagcttgctcgctaccttttgtcgggtcaaaatcaacccaaatcagatcgcccatatcgggtacgtatcggcttaccattaccagacttccttatctttcggctctccccagtcgatattctcgtggaggttttccggcgtgatgtcgttgaccagttcagcaagcgtaaatacgggctctttacgcactggctcaataattaatttgccatccaccaggtcaatcttcacttcatcatcaatattcagattgagcgcctgcattaacgtagccgggatccgcaccgccggactatttccccaacgctttacgctactgtggatcataaccctttcctcaaaccgctatcatatgtagatacagtatatatcaatctacattgtagatacgagcaaatttcggcttaactcccgtgcaaccgacgcgcgtcgataacatccggcacctggttgagtttacccagcacgcgccccagcacttgcaggttgtaaatctcaatggtcatgtcgatggtcgccagttgctgtttggtgtcgctacggctggcaacgccaagcacgttcaccttctcgttggcgagaatggtcgtgatatcacgtaacaacccactacgatcattagctaccacgcggaccaccaggctatatccggcggagtagctctcaccccataccgcgtcaacaatgcgttctggcgcatgggagcgcagttccgccagttgttcgcaatcggcgcggtgtacactaataccgcgcccctgggtaatgaagccgacaatctcatctccaggaatcggctggcagcagcgcgcgatgtggtgcatcaggttgccaacaccttcgactaccacgcgaccgttatctttactgcggttttgcggcgtgtagcttttttgctgaagttgcttcagcgcggcggcgtcctgctcttcggcactcggcttattaaattggctttgcaggaagttcaccatctgattgagacggatatccccgccaccaatcgccgccagcaactcgtcgacatcattgaagttgtaacgcggcagcagatgtttttctgcttctttcaggctgatccccagatgttccagctcgtcgtcaaggatttgccgcccagccagaatgtttttgtcacggtcctgtttacggaaccaggcgtgaattttgctacgcccacggctggttgtgacgtaaccgaggtttgggtttaaccagtcacggctggggttcggctgtttctgggtgataatttcaatctggtcgcccatctgcagctggtaggtgaacggcacaatgcgcccgccaatttttgccccgatgcagcggtgtccgacatcactgtggatgtggtaagcgaagtccagcggcgtacttcccgcaggcaaatcaacgacatcacctttcggcgtaaagacgtacacccggtcgtcaaagacctgactacgtacttcgtcgagcatttcgccggaatcagccatctcttcctgccacgcaatcagtttacgcagccaggcaatccggtcttcatgtccgctacgtgcgccgccagcagccgcgccctctttatatttccagtgcgcagcaacacccaactctgcatcttcatgcatctgtttggtgcggatttggatctcaacggtttttccacccggccccagaaccacggtatgaatagactgataaccgtttggtttcgggttagcgacgtaatcgtcaaactcatccggcaggtggcgatagtgagtgtgcactatccccagtgcggcatagcaatcctgtaaacgctcggcgacaatacgtaccgcacgcacatcaaacagctcatcaaaggcgaggttctttttctgcattttacgccagatgctgtagatgtgtttcggacgaccatacacttccgctttaacgccttcagctttcatctcagcgcgcagatgaccaacgaactcttcgatgtagtgttcgcggtcgagacgccgttcatgcagcagtttggcaattcgtttgtattcggttggatggaggtaacggaagcagtaatcttccagttcccatttcagttgtccgattccgagacggttagccagcggtgcgtagatgttggtacactcttttgccgccagtacacgttcatcttccggcgcatcttttacttcgcgcagatgagcaatacgctccgccagtttgatgactacgcagcgaaaatcatcgaccatcgccaataacatccggcgaacgttatcgacctgttcggaggaaacagaatcagtgtgcgtcgctttcagctggcggatcgccgccatatcacgcacgccgtgaataaggttaacgacgctcttaccgacgctctcacgcagcacatcttcgctgactacgttggcatccgccagagggaaaagcagcgccgcccgcagcgtgtcaatgtccatacttaatgtgctgaggatctccaccatctcaacaccacgccacaataacagactggcatccggatgcccctgcgtctgttgcagacaatacgcccaggtttcggctaagcactcacagctcttctggctggtaatacccagacttgcgatccatttttccggatcaaattcaccagccttattgatatgtgcacttcttaccgcaaccatcgtcctctcctttagggaccagacctgccgaaatcggcaaatcgcaattatttaacgcggctgaaaagtaccatgctttccagatgtcccgtgtgtgggaacatatccagcatcgccagtcgcgcaatggtatatcctgcttttaataacgcttcgctatcccgagccagcgttgcagggttacaggatacataaactatacgaataggttccagttttataatttgctgcataacacctgcggcacctgctcgcgccgggtccagcaacactttatcgaagccgtttttcgcccacggctgctttgtgacatcttcttcaagattttcgtgataaaacgtcacattctgtaagccattaagacgcgcattctgctggcctttttccaccagcgccggaacaccttctacaccgaccacactggcagcttgtgtcgccaatggcagtgtaaagttgcccataccgcagaacagatccagtacgcgatcttcaggttgcacatccagccattccaacgcacgcgctaccattttttggttcacacccgcattgacctgaataaaatcgcgcgggctaaaagttaagcgcaacccgttactgtcataccagggcatctcaccagagacggtttcgagtatctcactatcgggggcgagatacagatccaggccttcagaatggctaaagcgttccagtttttcgcgatctgcgctacttagcggtgcggtatggcgcaaaatcatcagcgtgccgctggttgcctgtaccagttcaacatgaccaagatggcgcatagcttgtaagctgcccagacatgccctgactttgggcagcaatgcttcaagttggggcgctaaaatggggcattgtttgacgtcgacaatgtcactggagcccgctttgcgaaaccccatctgaagttgctgtgttttcggtaagtagttcagacttaaacgcgcgcgacggcgatagccccagggaacatcggcgatcacttcagagacatcgtgtttcattaatcgggcgagtgccgcacttttgcttcgctgctgtaaatccacgctggcgtgttgttgctgacagccaccgcatacgccaaaatgaggacagcgtggcgtttcgcgttccgggctatcgcttaaccggcgtacgactttagcgcgggcatactgttttttatcttcagtaacagtaacttccgcgttttcctgcggcaataatccggggataaatagcgttttgccgttatgtcgcgccacgccctgaccaaaagagtcgaggtcgttgacactaacggttatgatctgacgcgtcgtcgtgcgtcgttttgcagagtagaattgcgccattggcgagactttctcaatttaacagtgtgaccttaattgtcccataacggaactccatgaccaactacagcctgcgcgcacgcatgatgattctgatcctggcaccgaccgtccttattggtttattgctgagtatctttttcgtcgtgcatcgctataacgacttgcagcgtcaactggaagatgccggtgccagcattattgagccgcttgcagtttctactgaatatggcatgagcctgcaaaatcgcgaatctatcggtcagttaataagcgtactgcatcgtcgccattccgatattgttcgcgcgattagcgtttatgatgaaaataaccgactctttgtcacctccaattttcatcttgatcccagtagtatgcagctcggcagcaacgtgccgtttcctcgccagctcactgtcactcgtgacggcgatattatgatcctccgcacgccgattatttctgagagttactcccccgacgaaagccccagtagcgatgccaaaaatagtcaaaatatgttgggatatattgcgctggagctggatcttaaaagcgttcgcttgcagcaatataaagagatctttatttccagcgtgatgatgctgttttgtatcggtattgcgcttatttttggctggcgcttaatgcgcgatgtaaccggtccgattcgcaacatggtgaataccgtcgaccgcatccgtcgcgggcaactcgacagccgggtggaaggatttatgctcggcgagctggatatgctgaaaaacggtatcaacagcatggcaatgagcctggctgcttatcacgaagagatgcagcacaatatcgaccaggcgacgtccgatctgcgtgaaacgctggagcagatggaaattcagaacgttgagttagatctggcgaaaaagcgcgcccaggaagcggcgcgtattaaatccgagtttctggcaaatatgagtcacgagctgcgtacaccactgaatggtgttattggctttacccgcctgacgctgaaaacagaattaacaccaacgcagcgcgatcacctgaatacgattgaacgtagcgcaaataatttgctggcaattattaatgatgttctcgacttcagcaaactggaagcaggtaagctgattctggaaagtattccattcccactacgcagcacgctggatgaagtcgttactctgctggcacattcttctcacgataaagggttagaactgacgctcaatattaaaagcgacgtgcctgataacgtgatcggcgacccgctgcgattacagcaaatcatcactaacctggtggggaatgcaattaaattcaccgagaatggcaacattgatattctggtagaaaaacgtgcgctgagtaataccaaagtgcagattgaagtgcagattcgggataccggcattggtattcctgaacgcgatcaaagccgcttattccaggccttccgacaggctgatgccagtatttcccgccgtcatggtggcaccgggctggggctggtgattacacaaaaactggttaatgaaatgggcggcgatattagcttccatagccagccgaatcgcggtagtactttctggttccacattaatctcgatctgaacccgaacattattatcgaagggccatccacccagtgcctcgcaggtaagcgcctggcctatgtcgaaccaaactccgcagcagcgcaatgcacgctggatattttaagtgaaacgccgctggaagtggtttatagcccaacgttctccgcgctgcctcccgcgcattacgacatgatgttgttaggcatcgcggtgaccttccgcgagccgctaacaatgcaacatgagcgattagcgaaagcggtaagcatgaccgatttcctgatgctggcacttccttgccatgcacaagtcaatgctgaaaaactcaagcaagatggtatcggcgcgtgtctgctgaaaccattaacacctacacgcctgttgcctgccctgacggaattttgtcatcacaaacaaaacacgcttttgcctgtaaccgatgaaagtaagctggcaatgacagtcatggcggttgatgacaaccccgctaacctgaaacttatcggcgcattgctggaagatatggtgcaacatgtggaactttgcgatagcgggcatcaggcggttgaacgggcgaaacagatgccgttcgatttgatcttaatggatattcaaatgccggacatggatggcattcgggcctgcgaactcatccaccaactcccgcatcagcaacaaacgccggttatcgcggtaacggcgcatgcaatggccgggcaaaaagagaagctgcttggcgcagggatgagcgattatctggcgaaaccgattgaagaagagcgattgcataatttgttgttgcgctacaagcctggcagcggtatttcctctcgcgtcgtgacgcccgaagtcaacgaaattgtggtgaacccgaatgcgaccctcgactggcaactggcactacgccaggcagcaggaaaaaccgatttagcgcgcgatatgctgcaaatgttactcgatttcctgcctgaagttcgcaacaaagttgaggaacagctggttggagaaaacccggaaggcctggttgatttgattcataaactgcatggcagttgcggctatagcggtgtgccacgtatgaagaatctctgccaactgatcgaacaacagctacgtagcggtactaaagaagaagatttggaaccggagctgctggaactgttggacgagatggataatgtcgcgcgcgaagccagcaaaattctcgggtaatggatgtcttgtcgagtagcaatcggctttttatgacgctggtttcagattggtgacaaagtgcctgtgtttatgccggatgcggcgttaacgccttatccggcctacaaaaccaattaaattcaatgaattaaaaaatgatgtagacctgatacatagcacaacaggctattttgcgtttagcatcagtctcaaaccggctccagatagagccggttttggttttctgtcttaacgcaccatgcacgggcgcttgttatcgaacgtccagccaggaatcagatactgcattcccatcgcatcgtcacgcgcgccaagcccgtgtttctgatacagctcatgggctttcatcacttgatccatatcgatttctacacccagccccggtttttctggcacctgtaccagcccgcctttgatctcaaacggttctttggtcaggcgctgattgccttcctgccaaatccagtgcgtatcaatagcagtaattttacccggtgcagcggcggcaacatgggtaaacatcgccagggaaatatcgaagtggttgttagagtgactaccccaggtcaggccaaattcatggcacatttgcgccacacgtacgctaccttgcattgtccagaaatgcggatccgccagcgggatatcaacggattgcagggagagcgtatggcccatttgccgccagtcggtggcgatcatattggttgcagtcggtagacctgtcgcgcgacggaactctgccatcacttcacgcccggagaaaccttgctccgcaccacacggatcttctgcataagccaggctacctttcaggtatttaccgattttaatcgcttcgttcaggctccaggcaccgttaggatcgagcgtaatacgcgcctgcgggaagcgttgcgccagtgccacaatagactcggcctcttcttccccggccagtacaccgcccttcagtttgaaatcgttgaagccatatttttcatatgccgcttccgccaggcgcaccaccgcatccggcgtcatcgcttcttcatgacgcaggcgataccagtcgcaactgtcatccggctggctttgatacggcagcggcgtggctttgcgattaccgacgaagaacagataaccgagcatttcgacttcgctacgctgttgaccatcgcccagcaggcttgccacgtttacccccagatgctgccccagcagatccagcattgccgcttctatcccggtaactacatgaatagtggtacgtaggtcaaatgtctgcaaaccgcgcccaccagcatcacgatcggcaaaagtattacgcaccagcgtcagaacgtttttgtattcacccagcgttttacctaccaccagcggaatcgcatcttccagcgttttacggattttctcgccgccgggaatttcccctacgccagtgtgaccagaattatctttgataatcacaatattacgcgtaaagaacggtgcgtgtgcaccactcagattcatcagcatactgtcatgacccgccaccgggataacctgcatttcagtaacaacaggcgtcgtaaattgagaactcatatttatgtcctttttcagaatcaatgacggccgaaaacgggacgtttacggtcaaaggtccagccggggatcaggtactgcatcggacctgcgtcgttacgcgcaccgccaggcagacgtttataggcctcatgtgccttttgtacctgttcccagtccagttccacgcccagaccgggcgcatcaggaacggcaatttttccgtttttaatctccagcggattttgggtcaggcgacaatcgccctcctgccaaatccagtgggtatcgatagcggtaggattacccggtgccgccgcgcccacatgggtaaacatcgccagagagatatcgaaatggttattagaatggcagccccaggtcagcccccagtcgtcgcaaagctgcgccacacggactgcaccggaaagcgtccagaagtgcggatcggcaagtggaatatctaccgcattgagcatcaccgcatgacccatttcgcgccagttggtggcgatcatgttagtcgcgacgggcaagccggtcgcccgtcgaaattccgccatcacttcacgtccggagaagccctgttctgcgccgcatggatcttcggcataggtaagaacatcattcagccctttgcataaagaaatggcttcatcaagcagccatgcaccgttgggatcaacggtaatccgcgcatccgggaagcgtttcttcaatgcacgaacagtgtcgatttcttgctcgccaggtaacacgccgcccttaagtttgaaatctttaaagccgtagcgatcctgactggcttccgccagacgcacaacggcttcgctgttcattgctttctgatgccgcaactgataccactcatggttgcccggcgtattttccacataaggaagatcggttttggtccgatcaccgatataaaacagataaccgaggacggtaatagcctcgcgttgcttgcctggccctaacagttcgcagaccggaacattcagcgccttacctagcaggtcaagcaaagcggcttccagcgccgccacggcgttaacgcgtaattcaaaggtccaggcacctttaccgaaggtatcaaaatcggcggcctgattacctttatgcacctgctggaccactttattcagtcgcgcaacttcctggcccagaaccatcggaatagcatcgacaagcgtctgataaatcacatctccgcccggcgcttcaccaatgccggtatgcccggcgttatcggtgagtaccacaatattgcgggtgaaatatgcgttatgtgccccaccaatattaagcaacatgctgtcatgcccggccaccggaatgactttcatatcagtaataacaggactggattgtgtcgccatcttattgccccgcaacaggtttcaactcgatacgcttgatatcgcccaccagcaccaggtagctcagtaccgcgattaaggcatgaacaccaacataaatcagcgccccattaaagctgccagtcgtgccaacgatataaccaattgcgattggcgtgacgatgccagaaatgttaccgaacatgttgaacaggccaccggaaagaccgctgatctcttttggcgcggtatctgccattactgcccaacccagcgccccgatgcccttaccgaagaaggccagcgccataaagccgatgatcatccactcaacgttgacgtagttgcagaacaccatcaccatgctcagcaacatgcccattacgatcggtgttttacgcgcaatgttcaggcttcccgtgcggcgcatcagccagtcggaaataatcccacccagcacaccgccgataaaaccgcaaaccgccggaacggaagccacaaagcccgctttcagaatgctcatcccgcgtgcctgcaccagataaaccgggaaccaggtaataaagaagtaagtcagggcgttgatacagtactgaccgatataaacgccgatcatcatccgactccctagcagctgtttgatctgcccccacttcacgctgaacggcactttaactttggtgttttgctgatccatattgatcagcgcaccacccgcggcgatgtactccagctctttcttatttacccccggatgttgatttggctcgtggatgactttcaaccagataaagctgatgacaatccccagaccgcccataaagaagaagacgtgactccagcccacttcatgcgtcagccagcccataatcggcgcgaagatcaccgttgcgaagtattgagcggagttaaaaatgctcaccgccgttcccctttcctgcgccggaaaccaggccgcaacaatgcgactgttgccggggaaagatggcgcttcagcaagcccgaccaggaagcgcagcgtaaacagggcaacgataatgccgaatccactaaagatatcgacgaagccttgcagcaaggtaaacatgctccagataaagatgctccagaagtagacgcgtttactaccaaaacggtccagcaaccagccaccagggatctgcccgataacataagcccaactgaaagcagagaacacatagcccattcccacgggatcaaggccgatatctttggccatttcgctaccggcgatagagagcgtagcgcggtcgccgtagttgaaggatgtgacgataaacaacatcaccactatccagtaacgagcatttgtgcgtttttccacactgctcgcagcctgacttaaagaactcattgttgcactcctgaaaattcgcgttagccacgctcactctggactgcgacatcgccaggaaatcagaggtgacgtagggtgttttttgccgtttttataggtcgttcgccgaatacggcgcgtgtttatatctggcaatagcagtataaaaagcgcgccatagcggctcaccgtgcaacaacacaacattaatgcgttcaatgaggcccgattttggcattagccctggacggtggaatccacttcacggaaatgaaaacaagaacaagaaaggaagggttaaaacgaagaaataaagaagagtatgaaatggatcgcttgactccaggcaaacgccagtaaaaatccgcgctatgaagcagtttttactggcatttgcctgaaaagattcgattcagcaccgctaaaacgacatttaccgctcgctgaacatatcaggacaacagcgtgccccactgttcgacccacggattactttccgtttccggttccgggttctcactggcgtcaatcaacagcatttcgccaacccgctgagcgctctgttcctgcaacaaggcatcgaactgtttgccgccattgcagaaattcacataactactgtcgccgagcgcaatcacgccataacgcagattcggctggaagcccagactatctttgattccctgaaagagtggcacaatgctatcaggaaggtcgccctgcccggtcgtggacgtaaccaccagaacatacttatcctgatagggcagccagtcgcttaattcaggatcttcaaataccgttgctttgtggccctgcgcggtcagaatcgcttccgcttcttcggccactaacagactattcccgtacatggtgccgacaaaaataccaatttccgccataccgttttctccctggattaggaacttatctctccatcctgaccgcttggcgcactgaactcaaccctttcattttcaggaagcagaccgcgccagccaaattgacttaacgcctgcatccaggtgtcgtccaggcccgcgtgaatagtcagcggctcgccagtaaaaggatgcgtcaaactcaactgactggcatgtagcattaaccgctggaggccaaaatgctcagcaccgctgcgattctggcgtaaatcgccatgtttgctatcgccaataatcggatgacgcaaatgggcaagatgtcggcgaagctgatgtttgcgtccggttttcggctccagttccaccaggccgtagcgcgtggtcgggtaacgtccggtcgctaccggcatttctacggtcgccagaccgcgataatgcgtcactgctggctgcgggcctttatcttcgcgggcaaatttatcagcgattttgtccagttcttccaccagtggataatccagcaccgcttcttccatcaaccagccgcgcacaatcgcatggtaacgtttctggatttggtgctgttcaaactgttgtgccagcagccgtccggcctcgctggataatcccatcaacaacacaccagaagtgggtcggtccagacgatgagcagtaaaaacatgctggcctatctggtcacgcacggtttgcatgaccactactttctcgtcgcgatccagccagctgcggtgaaccagccagccggagggtttatttaccgcaaccagccattcatcctgatagagtatttccagcattagctcgcatcatccgcaaaaagagcatccagtttttccagctcagccagaataagcgcgcgttgcggatggtccgtcgccagcgccatttcataatagggtgcaacggcaaaagcgcccggtaacggctgtttgttatctaacaaatcgtgcattcgcgggatcagcacccactgcaaccactccagtggttccatggtgtccataaagaacggttgggtactattaaattgatgcggctggggttcatcgtttcgccagtgctgatgttcacgcagtaacgcttcaagcgcctgcaactggagacgaacgcggtcatgagtggtcataaagcaacctcaataagaaaaactgccgcgaaggatagcaggaataaaaaaagggagcactgtattcacagcgctcccggttcgtttcgcagcattccagctacttttgttgctccctgctcatccttgacaacttttcctctggccttgcggccaatcgttcatcctgaactattgcttcctgctcacaccaccccgatgtgatacttcatcctgaagtgtccctggccttcctgacccaccgaatcatcctgaccggttctcattctccatcctggaggtgtcctttaacgcgtcctgcgtcatcctcttcgcttcatccagaagcctttccctgaaacaccatcctggtgtgtcctgcagaagtgtcatcatcctgatgttcacttcgttgtctgactccctgtcgacgaagatagaatcgtctttttcgcgaagtcttacaaggcgcttacagacaatgccttaaggaaaatttcatatgaaagttaagaattaacaatcaacattttgattttaaatgaaaataacgattcttatctttttaagtattcgcttatttcctggcgatctcctacagagtctgtaagagatctctcacaaccagatggggtatttggattacagaagaggcttaagttgattaaggaattccgcaagattactggctaaatgcgtccgtttacgtgttcccagcgtctctttgcacacttcaccggagagattacacacgctgatgacctctaactcttcttccagcgtcgcgataaatagtgtgggcggcagttttagccttttctgagtcaccagatgaccaatcagattttcctgcacccgacggaagtcgtcttcactccaggtttgcagcaatgtcagtttgatatcgccaaactgcgcgtgcatatccccggcaaactgagtcgtataaaaggtatgaattgtgggttgtatcacaatatcaaaagcgcgttcaaccgcgtttacattttgttccccggtaaacggctggggttgccagtatacggcatcttcggtagtactaataatgcacggactaggaacaccgtacagttcctcacttaacggccagcttttatgctcttcatgccacgcatcgcagtagcgtgcagtaaaatctttcagggcttgtgcggtcaaatcgtccactaatttctctcttcacttaaaccagatacacttgtcgtttagtttatctggtttatgacggtgaaacatgtcttcttatgcaaaccatcaggcacttgcgggcctgactcttggaaaaagtaccgattaccgggatacctatgacgccagcctactgcaaggcgttccacgcagcctgaatcgcgacccgctgggtctgaaagcggataacctgccttttcacggtacggatatctggacgctgtatgaactttcctggctgaatgcgaaaggtttgccgcaggtcgctgtcggtcatgttgaacttgattacaccagcgtaaatctgattgagagcaagagttttaagctctatctcaacagttttaaccagacgcgttttaataactgggatgaggtgcgccagacgctggagcgcgacttaagcacttgcgctcagggtaagattagcgtggcgttatatcgtcttgatgaactggaaggccagccgataggtcattttaatggcacttgcattgatgaccaggatatcactatcgataactatgaattcactactgactatctggagaatgccacctgtggtgaaaaagtagtggaagagacgcttgtcagccacctgctgaaaagtaactgcctgatcacccatcaaccagattggggtagcctccaaattcagtatcgtggacgccaaattgacagagaaaaactgctgcgttacctggtcagtttccgtcatcacaacgagttccacgaacagtgcgtggaacgcatctttaatgacctgttacgcttctgccagccagaaaaattgagcgtttacgcacgttatacccgtcgtggcggtctggacattaacccgtggcgcagtaatagcgattttgtcccaagcaccacaagactggttcggcaataaattttttctcaattttgcgtgctggattcacgcagaaggttgtgaaaggtcatcaggcagggctattgtaatcaaagggaatgacgatattcgtcccataaggagtttttcttgattacacatattagcccgcttggctccatggatatgttgagccagctggaagtggatatgcttaaacgcaccgccagcagcgacctctatcaactgtttcgcaactgtagtcttgccgtactgaactccggtagtttgaccgataacagcaaagaattgctgtctcgttttgaaaatttcgatattaacgtcttgcgccgtgaacgcggcgtaaagctggaactgattaatcccccggaagaggcttttgtcgatgggcgaattattcgcgctttgcaggccaacttgttcgcggtcctgcgtgacattctcttcgtttacgggcaaatccataacaccgttcgttttcccaacctgaatctcgacaactccgtccacatcactaacctggtcttttccatcttgcgtaacgctcgcgcgctgcatgtgggtgaagcgccaaatatggtggtctgctggggcggtcacagtattaacgaaaacgagtatttgtatgcccgtcgcgtcggaaaccagctgggcctgcgtgagctgaatatctgcaccggctgtggtccgggagcgatggaagcgccgatgaaaggtgctgcggtcggacacgcgcagcagcgttacaaagacagtcgttttattggtatgacagagccgagcattatcgccgctgaaccgcctaacccgctggtcaacgaattgatcatcatgccagatatcgaaaaacgtctggaagcgtttgtccgtatcgctcacggtatcattatcttccctggcggtgtgggtacggcagaagagttgctctatttgctgggaattttaatgaacccggccaacaaagatcaggttttaccattgatcctcaccggcccgaaagagagcgccgactacttccgcgtactggacgagtttgtcgtgcatacgctgggtgaaaacgcgcgccgccattaccgcatcatcattgatgacgccgctgaagtcgctcgtcagatgaaaaaaagcatgccgctggtgaaagaaaatcgccgtgatacaggcgatgcctacagctttaactggagtatgcgcattgcgccagatttgcaaatgccgtttgagccgtctcacgagaatatggctaatctgaagctttacccggatcaacctgttgaagtgctggctgccgacctgcgccgtgcgttctccggtattgtggcgggtaacgtaaaagaagtcggtattcgcgccattgaagagtttggtccttacaaaatcaacggcgataaagagattatgcgtcgtatggacgacctgctacagggttttgttgcccagcatcgtatgaagttgccaggcagtgcctacatcccttgctacgaaatctgcacgtaatctccgctcccccggtgacgtttgttgccgggttttctcgtttttggtcacttactcatcaactcatttcatttgttatatgaatgtttcttaccaccctcacgcgacaaatatcatcacagttaatatgtcatacaatttatgttgcaacgcaaacgtttccctattttcataaaccgtattttatcgctatgaaaaagaaattatcgccatgattaactaaaagtattgattttttcagttcaacctacatatattgcgcgccccggaagaagtcagatgtcgtttaatgggcaaatattgcccttaaattctcttttacttttgatttacagagtaaagcgttgggataatctatcttccaagtagattattgtatttgagatcaagatcactgatagatacataacttgtgtgtatctttccgccctcaaattattacggcggtaaatgattaagccatcgccgatagacagatttcatttttacggtcaggcaccttcccgggctgaactggctaaaagctgaattatttgcattcctccaggagaaatagatggaaacgactcaaaccagcacgattgcgagcaaagactctcgtagtgcctggcgcaagacagacaccatgtggatgctgggcctttacggcacggcaatcggcgcgggcgtgctgttcctgccaatcaacgccggtgttggcggtatgatcccgctgatcatcatggctatccttgcgttcccgatgacgttttttgctcaccgcggcctgactcgcttcgtactgtctggtaaaaacccgggcgaagacatcaccgaggttgtagaagaacactttggtattggcgcaggtaaactgattaccctgctctacttcttcgctatctacccgatcctgctggtttatagcgtggcaatcaccaataccgttgaaagcttcatgtctcaccagctgggtatgacgccaccgccgcgtgcgattctgagcctgatcctgatcgtgggtatgatgaccatcgttcgcttcggtgagcagatgatcgttaaagcgatgagtattctggtattcccgtttgttggcgtactgatgctgctggctctgtacctgatcccgcagtggaacggcgctgcactggaaacgctgtctctggacactgcatctgcaaccggaaacggtctgtggatgaccctgtggctggcaattccggtaatggtgttcagcttcaaccactctccgatcatctcttctttcgccgttgcgaagcgtgaagagtacggcgatatggcagaacagaaatgcagcaagatcctggcattcgcacacatcatgatggtgctgaccgtaatgttcttcgtcttcagctgtgtactgagcctgactccggcagacctggctgcggctaaagagcagaacatcagcattctgtcttacctggctaaccactttaacgcaccggttatcgcgtggatggctccgattatcgcgattatcgctatcaccaaatccttcctcggtcactacctgggcgcacgtgaaggcttcaacggtatggtgattaaatctctgcgtggtaaaggtaagtctatcgaaatcaacaagctgaaccgtatcactgcgctgttcatgctggtaacgacctggattgttgccaccctgaacccgagcatcctgggtatgattgaaaccctgggcggtccaatcatcgcgatgatcctgttcctgatgccgatgtacgcaattcagaaagtaccggcaatgcgtaagtacagcggtcacatcagcaacgtattcgttgtcgtgatgggtctgattgcaatctccgcaatcttctactctctgttcagctaagtcctttcgcgccgctttcgggcggcgcttcctccgttttaacgcgatgtatttcctatgattagcgtattcgatattttcaaaatcggcattggcccttccagttctcataccgttggaccaatgaaagcgggtaaacaatttaccgacgatctgattgcccgtaacctgcttaaagacgtgacccgcgtggtggttgacgtgtacggcagcctctctctgaccggtaaaggccaccacactgatatcgccattattatgggcctggcgggtaacctgccggataccgtggatatcgattccatccccagttttattcaggatgtgaatactcatggtcgcctgatgctggcaaacggtcagcatgaagtggagttcccggttgatcagtgcatgaacttccacgccgacaacctttctctgcatgaaaacggtatgcgcattaccgcgctggcgggcgataaagtcgtttacagccagacttactactctattggcggtggctttatcgttgatgaagagcattttggccagcaggatagcgcaccggttgaagttccttatccgtacagtagtgcagccgatctgcaaaaacattgtcaggaaaccgggctgagtctctctggcctgatgatgaaaaacgagctggcgctgcacagcaaagaagagctggaacagcacctggcgaacgtctgggaagtcatgcgcggcggtattgagcgcggtatttccaccgaaggcgtgttgcctggcaaactgcgcgttccacgccgtgctgcggcactacgccggatgctggtcagccaggataaaaccaccactgacccgatggcggttgttgactggatcaacatgtttgcactggcagtgaacgaagagaacgctgctggcggtcgcgtggtgactgcgccgactaacggtgcgtgcgggattatcccggcagttctggcgtactacgacaagtttatccgcgaagtgaacgctaacagtctggctcgttacctgctggtagccagcgccattggttctctttataagatgaacgcgagcatttctggtgctgaagtgggttgccagggtgaagttggcgtggcgtgcagtatggcggcggctggtctggcagaactattaggcgcaagcccggcgcaggtgtgcatcgcggcggaaatcgccatggagcacaacctcggtctgacgtgtgacccggtcgccggacaggtacaggtgccatgcatcgagcgtaacgccattgcggcagtaaaagcggtgaacgccgcacgtatggcgctgcgccgtaccagcgagccgcgcgtctgcctcgataaagttatcgaaaccatgtacgaaacaggtaaagatatgaacgccaagtaccgcgaaacctctcgcggcggcctggcaatgaagatcgttgcctgcgattaatcgctctccaaaggcctcgttttgcgaggcctcttcccgatttctcatccagccgtagcctgttccggcatcgaatgttacccttatcgcctgatctttaagggggttatcgtggctgttcatttgcttattgtcgatgcactgaatcttattcgtcgcattcatgccgttcaggggagcccctgtgtcgaaacctgccagcatgcgctcgatcagctcattatgcacagccagccaacccacgcggtcgccgtttttgatgatgaaaaccgcagtagcggctggcgtcatcagcgtttaccagattacaaagcgggtcgaccgccaatgccggaagagttgcacgacgagatgcctgcattacgcgccgcctttgagcaacgcggcgtcccgtgctggagtaccagcggcaacgaagccgatgacttagccgccacgctggcggtcaaagtgacacaggccgggcatcaggcaacgattgttagcacagataaaggctactgtcagttacttagtccgacattacgtattcgtgattacttccagaaacgttggctggatgcgccatttatcgataaagaatttggcgttcaaccgcagcagttgcccgattactggggacttgcggggatcagcagtagtaaggtaccgggtgttgcgggaatcggaccaaaaagcgccacgcagctgctggtcgagtttcagagtctggaagggatatatgagaatctggatgcggttgccgaaaagtggcgcaaaaaattagaaacccataaagagatggcgtttctgtgccgcgatattgcccgcttacaaaccgatttgcatatcgacggcaatttacagcaattgcggttggtacggtaacggcgagccggatacgccgcaaacgtcgtatccggcattatcacatcagcgcatttaccaggcggtatggtaaagctctacaatatcctcaagcgttgcttcacgcgggttgccaccggtacaaacatcatccagtgccgcctgcgccagtgccggaatgtcttccttgcgtacaccaacatcacgcaaatgtggcggaataccgacatcacggttgagagcaaacaccgcttcaacagcggcattacgcgcctcttccaggctcataccttccactttcacgcccataacgcgcgcgatatcgcggtacttctcaccggtaaagtcagcgttataacgcatgacatgcggtaacaggatggcgttcgcaacaccgtgtggagtgttataaaacgcgcccagtggatgcgccataccatgcaccaaccctaacccaacattgctgaagcccatacccgcaacatactgcccgagcgccatttcttctccggcatccttatcaccagcaacgcttcctcgcagcgccccagcaatgatttcaatcgctttaatgtgcagtgcatcggttagcgcccacgcgccacgggtaatatacccctcaatagcatgagtgagcgcatcgacacccgtcgcagctttcagcgctggaggcataccatccatcatgtcagcgtcaataaacgccacctgcgggatatcatgcggatcaacgcaaacaaacttgcgccgtttctcttcgtcagtgatcacgtagttaatggtcacttctgccgcagtacctgctgtggtaggaattgccagaatcggtacactgggtttattggtcggggaaagcccttccaggctacgcacatcggcaaactccgggttgttgctgataatgccaatcgctttacaagtatcctgtggagaaccaccaccaatagcgatcaggtaatccgcgccgctattctggaatacaccgagcccttctttgacgacagtaattgttgggttgggcactacgccgtcgtaaatcgcccatgccagccctgcagcatccatcttatcggtcactttcgccaccacgccgcattgcaccagcgttttatcggtgacgatcagcgccttctgataaccacggcgtttcacctcatcggttaaagccccaacagcaccccgaccaaaccatgccgtttcgttcagaatcattctgttagccatcatccttctccttgttgctttacgaaattactcttcaattcgtaacccataggttttgaatttctccagcactacggcaatctcttcatcgctcagcactggcaccgggtccgtaatcgccagggtcgtcaggtaaagttgcgccagcacttcaacttcatgcgccagccataacgctttttccagattcacctcacaagcgataagcccatgatgttgtaacaaagttgccttacgatttttgagagccagcgcaacatgttcagaaagttcgcgtgttccaaaggtcgcataaggcgcgcaaggaatagaattaccgccagccgccgcaatcatgtagtgaatagcggggatgcttcggttaagaatggaaactgccgtgcaatgaacggcatgattgtgaacaaccgcgttggcatccggtctgctttgataggctgccatatggaaacgccattcgctactggggagctttccttcctcatgtttaccgttgccatcaataaagacaatatggctctccgtcagtttttcatatggaatgcctgtaggcgtaatcagcatcccatcctgataacgtacactgacgttccccgctgtcccctggttcagtcccaggcgggtcatttccaggcaagtgtcaataatctgacgagcaagtttatttcgttccattagctacctctctctgattcaaaacagggcaataatgttgttcctttcacactattgaattagccgtttaattacccaccatcttcttcctgattaacaagaaagaaattcacaagcttatattttgtgacctggttcaactaatcacagtaaataactgcaagttctctttttataaccccattaaaaatgaccgctcttaaaaatatttatcaaaacggtcatttttctattcctccaagcccggaatgaccgttttcggcacaaacaattaatacggtcatctgatttgtgttttttatgatttattttctgaaacgggcatgaaatttcgattattaaagtgatggtagtcacataaagtcaccttctagctaataagtgtgaccgccgtcatattacagagcgttttttatttgaaaatgaatccatgagttcatttcagacaggcaaatattcactgatatgaagcccgaactcgctggttttgcacttttgaaaacataaccgattacgtgcttaagcttctgaacctaagaggatgctatgggaaacacaagtatacaaacgcagagttaccgtgcggtagataaagatgcagggcaaagcagaagttacattattccattcgcgctgctgtgcagtctgttttttctttgggcggtagccaataaccttaacgacattttattacctcaattccagcaggcttttacgctgacaaatttccaggctggcctgatccaaagcgccttttactttggttatttcattatcccaatccctgctgggatattgatgaaaaaactcagttataaagcagggattattaccgggttatttttatatgccttgggtgctgcattattctggcccgccgcagaaataatgaactacaccttgtttttagttggcctatttattattgcagccggattaggttgtctggaaactgccgcaaacccttttgttacggtattagggccggaaagtagtggtcacttccgcttaaatcttgcgcaaacatttaacagctttggcgcaattatcgcggttgtctttgggcaaagtcttattttgtctaacgtgccacatcaaagccaagacattctcgataaaatgtctccagagcaattgagtgcgtataaacacagcctggtattaagcgtacagacaccttatatgatcatcgtggctatcgtgttactggtcgccctgctgatcatgctgacgaaattcccggcattgcagagtgataatcacagtgacgccaaacaaggaagcttctccgcaagcctttctcgcctggcgcgtattcgccactggcgctgggcggtattagcgcaattctgctatgtcggcgcacaaacggcctgctggagctatttgattcgctacgctgtagaagaaattccaggtatgactgcaggctttgccgctaactatttaaccggaaccatggtgtgcttctttattggtcgtttcaccggtacctggctcatcagtcgcttcgcaccacacaaagtcctggccgcctacgcattaatcgctatggcactgtgcctgatcagtgccttcgctggcggtcatgtgggcttaatagccctgactttatgcagcgcctttatgagcattcagtacccaacaatcttcagcctgggcattaagaatctcggccaggacaccaaatatggtagctccttcatcgttatgaccattattggcggcggtattgtcactccggtcatgggttttgtcagtgacgcggcgggcaacatccccactgctgaactgatccccgcactctgcttcgcggtcatctttatctttgcccgtttccgttctcaaacggcaactaactgaacatattttccgaataaagtgaggaatctgtaatgaaaaaaatcagcttaccgaaaattggtatccgcccggttattgacggtcgtcgcatgggtgttcgtgagagccttgaagaacaaacaatgaatatggcgaaagctacggccgcactgctgaccgagaaactgcgccatgcctgcggagctgccgtcgagtgtgtcatttccgatacctgtatcgcgggtatggctgaagccgctgcttgcgaagaaaaattcagcagtcagaatgtaggcctcaccattacggtaacgccttgctggtgctatggcagtgaaaccatcgacatggatccaacccgcccgaaggccatttggggctttaacggcactgaacgccccggcgctgtttacctggcagcggctctggcagctcacagccagaaaggcatcccagcattctccatttacggtcatgacgttcaggatgccgatgacacaagcattcctgccgatgttgaagaaaaactgctgcgctttgcccgcgccggtttggccgtcgccagcatgaaaggtaaaagctatctgagcctgggcggcgttagcatgggtatcgccggttccattgttgatcacaacttctttgaatcctggctgggaatgaaagtccaggcggtggatatgaccgaactgcgtcgccgtatcgatcagaagatttacgacgaagccgaattggaaatggcactggcctgggctgataaaaacttccgctatggcgaagatgaaaataacaaacagtatcaacgtaatgccgagcaaagccgcgcagttctgcgcgaaagtttactgatggcgatgtgtatccgcgacatgatgcaaggcaacagcaaactggccgatattggtcgcgtggaagaaagtcttggctacaacgccatcgctgcgggcttccaggggcaacgtcactggaccgatcaatatcccaatggtgacaccgccgaagcgatcctcaacagtagttttgactggaatggcgtgcgcgaaccctttgtcgtggcgaccgaaaacgacagtcttaacggcgtggcaatgctaatgggtcaccagctcaccggcaccgctcaggtatttgccgatgtgcgtacctactggagtccagaagcaattgagcgtgtaacggggcataaactggatggactggcagaacacggcatcatccatttgatcaactccggttctgctgcgctggacggttcctgtaaacaacgcgacagcgaaggtaacccgacgatgaagccacactgggaaatctctcagcaagaggctgacgcttgcctcgccgctaccgaatggtgcccggcgatccacgaatacttccgtggcggcggttactcttcccgcttccttaccgaaggcggcgtcccgttcaccatgactcgtgtcaacatcatcaaaggcctgggaccggtactgcaaatcgcggaaggctggagcgtggaattgccgaaggatgtgcatgacatcctcaacaaacgcaccaacagtacctggccaaccacctggtttgcaccgcgcctcaccggtaaagggccgtttacggatgtgtacagcgtaatggcgaactggggcgctaaccatggggttctgaccatcggccacgttggcgcagactttatcactctcgcctccatgctgcgtatcccggtatgtatgcacaacgttgaagagaccaaagtgtatcgtccttctgcctgggctgcgcacggcatggatattgaaggccaggattaccgcgcttgccagaactacggtccgttgtacaagcgttaatacattactccctgatgtgatgcccggtcgctccggctaccgggcctgaacaagcaagagtggttagccggataagcaatgttatccggctatattgcaggagcgattatgaaacaagaagttatcctggtactcgactgtggcgcgaccaatgtcagggccatcgcggttaatcggcagggcaaaattgttgcccgcgccagtacgcctaatgccagcgatatcgcgatggaaaacaacacctggcaccagtggtctttagacgccattttgcaacgctttgctgattgctgtcggcaaatcaatagtgaactgactgaatgccacatccgcggtatcgccgtcaccacctttggtgtggatggcgctctggtagataagcaaggcaatctgctctatccgattattagctggaaatgtccgcgaacagcagcggttatggacaatattgaacggttaatctccgcacagcggttgcaggctatttctggcgtcggagcctttagtttcaatacgttatataagttggtgtggttgaaagaaaatcatccacaactgctggaacgcgcgcacgcctggctctttattagcagcctgattaaccaccgtttaaccggcgaattcactactgatatcacgatggccggaaccagccagatgctggatatccagcaacgcgatttcagtccgcaaattttacaagccaccggtattccacgccgactcttccctcgtctggtggaagcgggtgaacagattggtacgctacagaacagcgccgcagcaatgctcggcttacccgttggcataccggtgatttccgcaggtcacgatacccagttcgccctttttggcgctggtgctgaacaaaatgaacccgtgctctcttccggtacatgggaaattttaatggttcgcagcgcccaggttgatactagcctgttaagtcagtacgccggttccacctgcgaactggatagccaggcagggttgtataacccaggtatgcaatggctggcatccggcgtgctggaatgggtgagaaaactgttctggacggctgaaacaccctggcaaatgttgattgaagaagctcgtctgatcgcgcctggcgcggatggcgtaaaaatgcagtgtgatttattgagctgtcagaacgctggctggcaaggagtgacgcttaataccacgcgggggcatttctatcgcgcggcgctggaagggttaactgcgcaattacagcgcaatctacagatgctggaaaaaatcgggcactttaaggcctctgaattattgttagtcggtggaggaagtcgcaacacattgtggaatcagattaaagccaatatgcttgatattccggtaaaagttctcgacgacgccgaaacgaccgtcgcaggagctgcgctgttcggttggtatggcgtaggggaatttaacagcccggaagaagcccgcgcacagattcattatcagtaccgttatttctacccgcaaactgaacctgaatttatagaggaagtgtgaaatgctgaaaacaattagcccgttaatttctcccgaactattgaaagtgctggcagagatgggacatggagatgaaattattttttccgatgctcactttcccgcccatagcatgggaccgcaggtgatccgcgctgatggcctgttggtgagcgacttgctccaggcgattatcccgttatttgaactggacagttatgcaccgccgctggtgatgatggcggcggtagaaggtgacactctcgatcctgaagtagaacgacgttaccgtaatgcgcttagtctacaagccccgtgtcctgacatcatccgcatcaatcgttttgcgttttatgaacgggcgcaaaaagcctttgcgatcgttatcacaggcgaacgagcgaagtacgggaatattcttttaaaaaaaggggtaacaccgtaatctcataccggtacgcccgcatgacgcgggcggttatcgaatgatggggtgaaaaatatgaaagcggcacgccagcaagcgatagtcgacctgctgctgaaccataccagcctgaccacggaagctctctctgaacagctaaaggtcagtaaagaaaccattcgtcgcgatctcaatgaattacagacgcagggtaaaattctgcgcaatcatggacgcgctaaatatatccaccgtcaaaatcaagacagtggcgatccctttcacatcaggctgaaaagccattatgcgcataaagcagatatcgcgcgcgaggcgctcgcgtggattgaagaagggatggtgatagccttagacgccagtagtacttgctggtatctggcacgccagttgcctgacatcaacattcaggtcttcaccaatagccatccgatttgccatgaactcggtaaacgcgaacgcattcaactgatcagttccggcggcacacttgagcgcaaatatggctgttacgtcaatcccagcctgatttcccaacttaaaagcctggaaatcgatctgtttattttttcttgtgaagggatcgatagcagcggcgcactgtgggactccaatgcgatcaacgctgattacaaaagcatgctattaaaacgtgccgcgcaaagcttgttattgattgataaaagtaaatttaatcgtagtggggaagcccgcatcgggcatctggatgaggtaacgcacattatttctgatgagcgccaggttgcaacttctttggtaacagcctgacggaaagggtagcaggccggagacgacgccccggccttgcctgttatcgctcgtcgcgacgaccacccaccgcagcccagatgcggcggacgtgcaccgtcacttcttcgcgatcgtgatacaactgccgcgcctgaatctgagcatttatgccatgttcatcaagctgtgcctgaatatacgccagattgtgactcacttcttcgtagcgttttttcatcggcagtttgaggttgaaaatggtttcacggcaccagccattaaccagccactgtgccatcaatgccgcaactttcgccggtttttcaaccatatcgcataccatccaggagatattgctgcgcgtcggacggaatttgaaaccgtcttcccgcagccacgtcacctgtccggtatccatcagactttgcgccatcgggccgttgtcgacggaataaacccacatgttgcgcttcaccagttggtaggtccagccgccagggcaagcgcctaaatccaccgcccacatcccgttcgccaggcgttcatcccactcatccgcaggaataaacacatgaaatgcctcttccagtttgagcgtggaacgactcggcgcatctgccggaaatttcaggcgcggaatgcccatatagaacgggctattattgttgctgtaactgtaaccggtatagcagcagcctggtgcaataaagaatacatgcacaaccggacgcttcggcgtttcatagttcgccagcaccccggcatcgcgcaaggcagcgcgtagcggaacagtaaatttacggcagaatttcagtaactctttgctttcgttggtatcggcaacttcaacacgcagttcaccgcccttctctactacgccctgtaacatgccgacaatgggggtaatacgatcttctggcggcaaatgctgcaggagttcccccaccacaaaccactggcgggcaaaaattaaactactgaacggcagctcacggattaacttatcgccatcatcaggttgataacattcataaatgacataacccgcattctctttcacgcgggcaaaaccgaaaatttcccgctggccggctttatcggtaatttctgcggcgcactctttttcaaagcccggacggcacagcaatacaaccttattcatgacttacgcccttgcgctttaaacggatagcaccaactaacattaacgcccagcccgcgaggaagctcacgccgccaaccggagtgacaaacgcccacaaacgcagatgggacagcgccaggcaataaaggctgccgctgaacaacaccgtgcctaacgcgaggaaaacgctactccagtaaaaccagatactgatgcgacgctgcattgccaccgccagacctaagatcgccagcgtatgaaacgcctggtattcgaggccggtctggatccagcccatctcaacggcccccatggttttacttaacacatgcgcgccaaaagcgcccagagccacaaaaatgaagccgctaatggcggcgaaaatcagcataaaacggctggtcatggtcgtaccctacgtaaattattgttcataacgaaagcggaatttttcttgttcagcagcggctttcgccaggatccattggcgaaaggcggctattttacccagttctgcctgactgtcatgacaaaccagataaaaagcatttttactgaccagaacatcattaaacgggcaaacaagacgtccggcctcgatttcagattgcgccatcacgttatttgccagcgccactccctgcccgtggatagccgcttgcagcaccatggcgctatggctaaaaattggcccttgctgaacgttgatatgatttaaccccaactgtcgggtatatgtctgccagtcacggcggctagcatcatgtaataacgtatgtttagccagatcttccggtgtcttcaagggtttttcgccagtcagcagtagcgggctacacaccggcaataaatattcggcgtacagtttttccacccgtagccccggccagttgccccgaccataaaatatcgccacatcaacatcatccgccagcttatcttcctgacgatcaaccgcctggattcgaacgtcaattcccggataagcactattaaagctggaaagtcgcggaaccaaccaatgaatggcgaaactggggagtaaactgaccgtcaacgcccccttggcgctacgggcctggagtttacgcgtcgcttcggttaattggctaaatatctctttgatatcgaggaaatagctttgcccttcctcggtcagcaggagactacgattacggcggcggaacagttttagccccaaaaaatcctcaagagacttgatttgatgacttactgcggcttgggtcacaaaaagctcttctgctgcgcgagtgaaacttaaatggcgtgctgcggcatcaaaaactcgtaaggcatttagcggtggtaatcgtttagacatggctattaaactttgatgttaaatgaatttaacaattagatcacactatgtaacctattagtttttttaatctgagccattataaattgtccgttgagcttctaccagcaaatacctatagtggcggcacttcctgagccggaacgaaaagttttatcggaatgcgtgttctggtgaacttttggcttacggttgtgatgttgtgttgttgtgtttgcaattggtctgcgattcagaccatggtagcaaagctaccttttttcacttcctgtacatttaccctgtctgtccatagtgattaatgtagcaccgcctaattgcggtgcttttttttaccttgcgatcgcgaattactgatccagttcgaccatctctttcacgtcagtacggttgatctgctgtttgttgccattagcgtctttatagctaatcataccggtatcgttatcagtctgtggtttgccgtcagagacgatggtacgtccgtcattggtgtgcatcacatagttgctaccggaacaggcgctcagggcaaaagtcagcatacaggcagaaataattgcggcagtctttttcatcatcttctccttaaagcgattaataaatcttaatagtattgattaacaggctaaaattaacgcctaacactattcagcatatgttacttacgcggcttcgccaggatatccagataattctgatggttagcactctccttgtatcaaagtgaattttgcgtcacgatcggtgcatcaagccgaggagtaccatgaacgtttttaatcccgcgcagtttcgcgcccagtttcccgcactacaggatgcgggcgtctatctcgacagcgccgcgaccgcgcttaaacctgaagccgtggttgaagccacccaacagttttacagtctgagcgccggaaacgtccatcgcagccagtttgccgaagcccaacgcctgaccgcgcgttatgaagctgcacgagagaaagtggcgcaattactgaatgcaccggatgataaaactatcgtctggacgcgcggcaccactgaatccatcaacatggtggcacaatgctatgcgcgtccgcgtctgcaaccgggcgatgagattattgtcagcgtggcagaacaccacgccaacctcgtcccctggctgatggtcgcccaacaaactggagccaaagtggtgaaattgccgcttaatgcgcagcgactgccggatgtcgatttgttgccagaactgattactccccgtagtcggattctggcgttgggtcagatgagcaacgttactggcggttgcccggatctggcgcgagcgattacctttgctcatagtgccgggatggtggtgatggttgatggtgctcagggggcagtgcatttccccgcggatgttcagcaactggatattgatttctatgcttttagtggtcacaaactgtatggcccgacaggtatcggcgtgctgtatggtaaaagtgaactgctggaggcgatgagcccctggctgggcggcggcaaaatggttcacgaagtgagttttgacggcttcacgactcaatctgcgccgtggaaactggaagctggaacgccaaatgtcgctggtgtcataggattaagcgcggcgctggaatggctggcagattacgatatcaaccaggccgaaagctggagccgtagcttagcaacgctggcggaagatgcgctggcgaaacgtcccggctttcgtagtttccgctgccaggattccagcctgctggcctttgattttgctggcgttcatcatagcgatatggtgacgctgctggcggagtacggtattgccctgcgggccgggcagcattgcgctcagccgctactggcagaattaggcgtaaccggcacactgcgcgcctcttttgcgccatataatacaaagagtgatgtggatgcgctggtgaatgccgttgaccgcgcgctggaattattggtggattaatgacaaacccgcaattcgccggacatccgttcggcacaaccgtaaccgcagaaacgttacgcaataccttcgcaccgttgacgcaatgggaagataaatatcgccagttgatcatgctggggaaacagcttccggcattgccagacgagttaaaagcgcaggctaaagagattgccggatgcgaaaaccgcgtctggctgggatatacagtggctgaaaacggcaaaatgcatttctttggcgacagcgaagggcgcattgtgcgcggcctgctggcggtgttgttgactgccgttgaggggaaaaccgccgccgagttgcaggcacagagtccactggcattgtttgatgagctgggattacgtgcgcagcttagcgccagtcgcagccaggggttaaatgcgttaagcgaggcgattatcgctgcgacgaagcaggtttaagcacagaaccgggtcggataagacgttcgcgtctcatccgacctgattgtttaaccctgacgcgccgctttcgccatcatcttcttcagcgcatgagaaaccgcaacaaacccaaaggtggcggtcaccatcgttgccgcgccaaatccagatgcacaatccatccgcttcggcccttctgccgtggctttcatcgcacacaccgtaccgtcactctgcgggtacaccagcgcttcagtagaaaacacgcaatccacgccgagcttacctttactgtttttcactacgccaaaatcgcttttcaggcgctcgcgcaacttcgccgccagcgggtcctgaatcgttttcgccagatcggtaacctgaatctgcgtcggatcaatctgcccacccgcgccaccggttgtgaccagtgggattttattgcgccgacaataagcaatcagcgccgctttgggccgtacactatcaatggcatcaatcacgtagctataacccacgctcatatactgcgctacgttatccggcgtcacgaaatcatccaccaccgttacacggcactccgggttaatctggcgaatacgctccgccataacttccgcttttgccagcccaacgttatcgcgcagggcatgaatttgccgattggtattggtgacgcacacatcatccatatcgataagcgtgattgcgccaatccccgtgcgcgccagcgcttccgccgcccaggaaccgacaccaccgataccaaccacacaaatatgcgcgtcagcaaacagttgcaacgctttttcaccatacagacgcgctgtgccaccaaaacgctgacgccatgcatcactaattaccacagacatagcacctcagaattaaaaagggcgaggttatccctcaccctaaacgcataaatgcctgatgcgctacgcttatcaggcctacataactcctgcaatattttggatttgcatgatttgtaggccggataaggcgttcacgccgcatccggcatgaacaacgcgcacttagtcaataatcaggatgtgaggttacccctcaccctgtcatatccgtaaaaacggcatacagaatatcacatcagccgctaaagacgttacctgcgcccggggcggttttcagcacccagacacgtccatagtggttgtaccaacctgcgcggtgtccggcttccggcccgatcccttgatagatatcgaagtgttggcctttgattgcaccaccgacatccagcgccaccatcagacgcagttcgtactgaccattaaatttgccgttattatccagcaacggcacttctgccagcaaggtagtacctggcggaataatggaacgatcagaggcaacactcgcgcgaccaaccagcggcaccgcacttgcccctttcaccggagcaaaagattgcggtttaaagaagacgaaagacgggttctgttccagcagctcgcgaacctcggcttcactgtgtgtttcgccccagtgacgaatcgcctgcatgctcatatcttcttttttcacttcgccacggtcgatcagcaccttaccaatgctgcgataggcatgaccgtttttccctgcatagctgaaaaagttaagcggactgccatcaccaaagtcgatatacccactaccctgcacatccataatgaagttatccatcagggagttactgtaagcgagaatatatttatcactcaatgcccccgcgtagatctccgcacgagacggcagacgaccacgttttggcggcatacggtaaataggatactggaactcgccctggcgggtatggcgcgcctgaattaccggcgtgtaataaccggtaaactgcacgttaccatagttgtcggcaccttccatctgccaggcatcaatgccgaactggcgcatattgcgggtatcaccgcctgcgcgcagccactcttgcaccgcgttataaacattactctggttgccatacagacgcggactgctattacggatatggttaatttgctcggcaaaatcaccggcgttaatcggcgcgccaacggcatctggctggttcaccagagagaaaggctgggtaaatttcccgtctttatattgctgtccgcgatcggttggtttggaagagcaggcggcaagcattgccacaaccgtgcccataagaaggtactttacccaacgtcctttcattgttctcttcttcaggttaaaaaataaggcgcaacgaagataacaaaccgccgcgtttaatgaaatgagcagcctctccctgacgcaaattttgcacaaaaaataggctttagtgatttgtttttgttcaaaatcatgccaaatccgtgatcggggtaaaaaaaaggttgcatgaaaacgcgagcggagtatagtgcgcatccacggacgcggggtggagcagcctggtagctcgtcgggctcataacccgaaggtcgtcggttcaaatccggcccccgcaaccaattaaaatttgatgaagtaaagcagtacggtgacgcggggtggagcagcctggtagctcgtcgggctcataacccgaaggtcgtcggttcaaatccggcccccgcaaccaatcaaatttgatgaagtaaaagcagtacggtgacgcggggtggagcagcctggtagctcgtcgggctcataacccgaaggtcgtcggttcaaatccggcccccgcaaccaattattgaacaccctaacgggtgtttttttgtttctggtctcccataaaaaagcgccattcagcgcctttttatcatccccttctcgccagcgtcgccccatcggcaaaatacgctttaatccccgcaagaatagactccgcaacttcctgctggaaagtcgccgttttcagtttacgctcttcctcaacgttactgataaacgccgtttcgaccagaatggagggaatatctggtgcctttagtacggcaaacccggcctgttcaacttgatttttatgcagcttgttgattttaccgagcttattcagtaccgctttaccaaacttcaggctgtcggcaatggtcaggctctgtaccatatcgaacatggtgtggtcgacatagcggtcaccgcttttgctcacgccaccaatcaagtcgctggcgttctgggtttgtgccagatattttgccgcagtactggttgcacctttggtactgagcgcaaacacagaggaaccgctcggctgacgactggtaaaggcgtcggcatggatagagacaaacaggtcagcacgctgtttctgggcttttgctacgcgcacttgcaatggaatgaagatgtcttcattgcgcgtcatgtacaccttcatattgccctctttctcgatcagagagcgcaaacggcgagctatttgcaataccacatctttttcgcgcgttttgtatttccccaccgcaccggagtcttcgccaccgtggccagggtcaagcataatgacaatcggacgatcgcgccctgctttacccggttgtggaccactttgcgctggcggcacctgcttttcgaggtcgcctttgttgtaatcctccagcagcgccagcagcgggtcctgcatatcctgtgcattggccggatagaggtccatcaccagacgctctttaaacccggcgaccggcgcaagggcaaacagctgcggttttacgttttgctttaattcaaaaaccatccgtacggtttgcgggtcaaattgcccgacgcgcgcgctcttgatgaacgggtcgtctgcacgaatttgtgccgccatccccttgagtacgctgttcaggtttacatcttcgatatccaccaccacgcgttcagggttactcaacgcgaactgcttatatttcagctgacgattactttccaccgtcacgcgggtgtagctggacgcaggccagacgcgcaccgccacgacctggctgaccgcagccagactgacctgacttacgctcaatagccacatggcacccgcgccttgcagtaaacgacgacggctgattgcagtgttggatccactcatgcctctcccgagcaaaagaaatctaagctgtgtaacaagtaaacgactaatttgaccggaaactttagcgaaagacgcataatctgtcatctaataaacggtaaacattctttttatattcacggcattactgataaaaaagtcgctctcgcataaaatttacacttgcaccctgcgaaaaaacagaataaaaatacactaatttcgaataatcatgcaaagaggtgtgccgtggtaaaggaacgtaaaaccgagttggtcgagggattccgccatagcgttccctatatcaatacccaccggggaaaaacgtttgtcatcatgctcggcggtgaagccattgagcatgagaatttctccagtatcgttaatgatatcgggttgttgcacagcctcggcatccgtctggtggtggtctatggcgcacgtccgcagatcgacgcaaatctggctgcgcatcaccacgaaccgctgtatcacaagaatatacgtgtgaccgacgccaaaacactggaactggtgaagcaggctgcgggaacattgcaactggatattactgctcgcctgagcatgagtctcaataacacgccgctgcagggcgcgcatatcaacgtcgtcagtggcaattttattattgcccagccgctgggcgtcgatgacggcgtggattactgccatagcgggcgtatccggcggattgatgaagacgcgatccatcgtcaactggacagcggtgcaatagtgctaatggggccggtcgctgttagtgtcactggcgagagctttaacctgaccagcgaagagattgccactcaactggccatcaaactgaaagctgaaaagatgattggtttttgctcttcccagggcgtcactaatgacgacggtgatattgtctccgaacttttccctaacgaagcgcaagcgcgggtagaagcccaggaagagaaaggcgattacaactccggtacggtgcgctttttgcgtggcgcagtgaaagcctgccgcagcggcgtgcgtcgctgtcatttaatcagttatcaggaagatggcgcgctgttgcaagagttgttcagtcgcgacggtatcggtacgcagattgtgatggaaagcgccgagcagattcgtcgcgcaacaatcaacgatattggcggtattctggagttgattcgcccactggagcagcaaggtattctggtacgccgttctcgcgagcagctggagatggaaatcgacaaattcaccattattcagcgcgataacacgactattgcctgcgccgcgctctatccgttcccggaagagaagattggggaaatggcctgtgtggcagttcacccggattaccgcagtagtagtaggggtgaagttctgctggaacgcattgccgctcaggcgaagcagagcggcttaagcaaattgtttgtgctgaccacgcgcagtattcactggttccaggaacgtggatttaccccagtggatattgatttactgcccgagagcaaaaagcagttgtacaactaccagcgtaaatccaaagtgttgatggcggatttagggtaagcgatgaaaatcgtcggatgcgacatgcgtaacactcgtacgtcgcatccggcaattacgtttattcccgactactaaacaacgccgccagaccactgcgccgctcagtacgagtggcgattgccgcacttaatatgcgctcatcggcatacaggctcagacggcgacgcgcgcgggtcaccgcggtataaaccagctctcgcgttactaccggcgtgcgttggctcggcaaaatcaacgccgcatggtcgaactcgcttccctggcttttatgtaccgtcatcgcccacgtagtttcgtgctctggcaagcgactcggttgcacagacttaatattgccgtccggcatcgcaaaccagacgcgcgtcccctgcccgcgatccagcgcaataccgatatcgccattaaacaacccaagcgcgctgtcattacgggcaatcatcaccggtcgaccttcgtaccaacgagagtgcggatgacgatgaattttgcgcttctgttgcataaactgctcaattcgctcattcagtccagccacgccaaacggcccttcccgcagggcgcacaaaagctggtactcattgaacgcctgaatgattaaatccggctcggcacgcgcttgcagcagatccagataacgtccgtaacccgcaagagcttcctcaagcatcgcaatataatcttcgccgctctgtaaaagccgtttttcgatatcagtaaaatcctgctgaaaaacggttttcactgccgttttatcaccacggttgatcgccgcagctaactgaccaatgccagaatcgctgccgaaacgatagcttttttgcagcaggcagagactgtcgcgcaaagatgccgcttctgtgccggttcctgccggaacgtgagtccccgtcaggcggcttagctgcctggcacgctcggcggtaaagcccgcgttggcataagcgcagatatcgcccagcacagccccagcctcaacgctggccagttgatcacgatcgccgagaaagatcactcgcgcatgatcgggcaaggcgtcgatcagtctgctcatcataggcagatcgatcatactcgcttcatctaccaccagcacatcaagatgcagcgggttaccggcatgatgacgtaaacgctggctacccggctgcgcgcccagcaatcggtgcaaagtgctggcatcttccggaatgcgtttcttttgttcatcggtcagcggtaactgtcgcaaagccttgccgagagattcggttaagcgcgcggcagctttacccgttggtgcagccagacggatacggcagcgttcgccgtcggccatttgaattaacgctgccagcaacttcgctacggtggtcgttttaccggtgccagggccgccggaaatcacgctgatccgccgcgtcagcgccactgccgccgcaactttttgccagttaatttcatcgcttactggaaaaagtttgtccagggtttgcgccagtagagcttcatcaacctcaatggcatgattcacttcgttgaaaaagcgtgccactgtgcgctcgttacaccacatgcgattcaaataaagacgatcgccacagaggatcatcggcgtgggttcatctcccctgctgaccgcttgagaagccagcaagcattcttcccaattttgtagctcaccgatttcactgacacaggtcgccaacagcggatggctcgcctcgttattttccagtcgactaagcggcaaacaaacgtgtccctctccggcatcatgacttaacagtgccgccgcgagggtgacggcaggatgttcatctcccgccacggtcagggcaaattgcacatccagcgggcgtagctgtttgtgctccacagcttccagtaattgcttttgcaatttcattacgcctcctccagggtcataccggcaaacatctcatccatcagggcaatcaacccggcgttgggtcgggttgtgtaaatcccctgttgcggatgttctttatcaacgccacgcaggaacagataaataacgccgccaaagtggtgctcatagtcgtaatcagcaatgcgatggcgcagataacgatgcagcgccagggtataaagctgatattgcagatcatagcggtgtgcctgcattgccgctgccatagcctgttgggtgtaagcgctactgtcttcacccaaccagttggatttatagtcgagcaggtaataacgcccttcgtggcggaacaccaggtcgataaagccttttaacatgccacgtacctgcatgaactccagcggcgggcagcctgcggatagcgggtcaaactggcggattaacgtatcaagctgactggcgataagcggttcactaatcggcagataaaactccatctccacctgtttattgcgggcggaaagttgactcaggcttacgccggtttcattgagaggtgcctggaggacagccgtgatccactcggtcaataccggttcccactggctttcaaagccgccgagttccagtttttcccgcacccagttcgggtcaaccggctgggtaaaatccaggtcttcaaacaaactgtgcaagaacgtccccggactcgcaccgcgcggaaactgatgtggtgttaacgtcggttcttcaacgacgctggcaacgcctgcagcatcgacatccagccgaggcatcaaatcctgggcgataccgtgaccacgctgttgcaaaccagagtagctggtgacgcgccagttatcgccgggcaatcgttgtaacgtcttcgcattcagctctgctgtagaaacatcattaacctgccagggttggttatcaccagtttgtgccgtttgccaggcaatatcatcatcgcataacgcttcaatacaggtgcgaagccctgccgcatcttgcggttcccctttttgcagcaaacgcccgagcgcactttggtggacgtcggtgtcaccttttttatcgccacgacggcgcaccagcggtgcaacgccgagactgcaatgccaaacgctacgtgtcagcgccacgtaaagcaaacgcagatcttccgccagacgttcggcctccgcgaggtcgacgctttctggcgcagcattaagatccagaactgcctcaaagctgtggcgatcgtgataaaacgcctgctcctggacgcggaaattggtgataaacggcagccagaccaatggatattccagccctttgcttttgtggatcgtgacaatctgcaccagatgtttatcactttcgagacgcatttgttggctggaggcattactgtctggctcgaggatatgttggcttaaccagcgtaccagcgcatgttcactttccagctgcgttccggcttcttgtagcagttcgctgatatgcaagatatcggtaagacgccgctcaccgcctgccgttgccagcaagttttcagcaatgttacgcgcgctcatcagcgcccgcagcatcggcataacgccacgtttgcgccagatttgccgataaccatcgaactcttcgactaccacatcccacgcatgttcgtcattgttcagcgtttcgatatccagcgcgttcagccccatcatactcgttgccagcgcactacgcagggtgttctcacgttcgggcgtcatcaccgcctgcaacaaccaaagcatttcctgcgcttccagagtttcaaaaacactgtcgcggttgctaaggtaaacggaagggatttccagcaacgttaaggcatcgcgcacctgggcggcctcctggcggctgcgcaccagcacactgatgtcgctagcacgcaccggacgcgcgtcgtcgccgttcatcagcaacgcttcgccccgctgtccggcttgtagccagtcgcggatttgcgcagcacatacctgcgccatggtactttgataatcgccaacgccgcagctttcgccttccatcagccacattttcatcgcaggctgtgtttcacctttaaatacaaaacgtaacgcctgatttttcccggcacttttcactggaataaacggtatttcgcgaaacatgaacgcgtcatcagtctggctgaaaagcttattcacgctgttcaccattcctggtgcggaacgccagttggtgtctaaagtgtagtgggcgtgaacttcgctacgcgccttcatataagtgaagatatccgcaccccggaatgcatatatggcctgcttcgggtcgccaattagcaacaatgcggtttccggctgatggtgccagatacggcgaaaaattcggtactgctgggggtcggtatcctgaaattcatcgatcattgccaccgggaatcgcgtacggatcgccgctgccaacacctcaccgctttcgctacgcagcgcggaatcgagccgacttaacatgtcatcaaaacccaattcgccacggcggcgtttttcacgcgctactgtttcgcggatctcagccaatgcgcgggtgatcaccagatcgcggatgctcaatggttctgcaagcagttgatcgatcgcctcaaacagtggatgtcgcggggtttcccccccggccttcgtgcgatcttctaagaaacgctgggagaatttttccaggctctccggcaactgataactgtttgtctcttcttctgcccaggcgctgatcttgtcgatccatttagcctgattgctacggttaaacttgcgtcgatcaataccagaagattcgatcagcgcatccagttcacccactgcgtcgcgccactgctgttttaccgtatcaatacgcgccacaatttgcgcgtgacgggaagccagcgtttcatcatcgggcggcggtgctttgataaccggcgcttcgccttgcagataacgattaatatcgcgcagcaacgcctgcggccctttccaggtttcaaagacgacctgggctatttcacgcggcagcgggtagcagtggcgacgccagaaatcggcgcaggcctggtagcgtagcagagactcatcttcaatcagctgctgctcaaacagcatgccggattcaaaggcattcaggttgagcatgcgctggcaaaagccgtgaatagtaaagactgccgcttcatccatctgccgttcggctaacaacaaccactgcgcggcttgcgctttatcgtcgatctcttccagcaggcgttcgtacagtggattgtcggtggtttcacgcagacaggcgatgcgcaactcgtggatattgctacggatacgaccgcgcaattctgccgtggcagcctcggtaaaggtgaccaccagcagttcttcaacggtcagcgggcggggaaaggcggcggaaccgcctagtccaagtaacaggcgcaaatagagcgccgcaatcgtaaaggttttgcctgtgccggcagaggcttcaatcaggcgctcaccctgtaagggcaagcgcaaaggatctagtgtctcggcgacatcactcattcttttcactcatcaggggcattgtttgctgcaacgcgctgacgttctcccacactttccagccttcagggtgtacatattcggctttcccgttctggctgccggaaatctggctcagaatagccatgccttgcggctcgaccaccgcctgatggaagaaatcagcaagtttttgcggcgtcagcagttttatctgggccacgattttatcacggctatcgaagcgcatattgccgcgatcgaaatctttacttaacttgcttgcttcttcgccgagcgtttgcggtgcctgcagcatctgggtaattaccgcctgctggatttgcgcaaactcatctggcttcatcgctcgcaattttgcctctgcggttgggaaaaacgccttgtaacgctcccacaagaaactaggctgtttatcattgctttgcaaaaggaagcccatgccccactgacgccccacgctcattggaaacgcaaacacggcatagcccaattgttcttcggtacgcaactgattgtagaaccacggctgtacgatctgccccaacagagagctataggcactgctggtgtattcatcgtagccagtcggtacaaataccgctgccagtgcggagtcggtgctgttaccggctttttcaaagatgacggattgttttttatcgaccactacatctttgtttcgacaccactcactaccatcagcgcccaactgtttttgcacatcgcgtgccagcgttgttgcctgggcctcggtcatgttgccgataaccataaactctggtcgagccccactttttaaggcgtcgcgataggccagcacctctttcaacgtaatggagggcaaaattttacgccgttcatctcggctgaagtacggcacttggctgagcatctgcgcgggcataatcgcctgctcaaacgctttacccttttctgcggaatccatcatctggttataccaggacttcgcctgctcaagctgatcttccgtagcggtatagctaaagtacccctcgagcaatgcctggaacagctgcggcagacgctgggtgtaaccattagcattaaccataaggccgttgttagcgttggtggaaaaacttatgccaccaacgctcgcctggttgcttaactgatcaagcgccagccctgcgagataatcattgagcgcaaacatcacctgattgcgggcgctgtccatggctttcggattacgcaaaatcaggctgacatcagctttgggctcgctggcaaaataacggcttggcgcatacaccacgcgcagattgctctcatcaacaatcagctctggatggtcgtatttcttctcactcttaatcaggctgaaatcatcaggaatataagggttaagctctggcaaagagagcgcaatgtcggcggcttttttctgccagtcggcgaaagtttgtgcgctgattttatcgacctgatacggcgcatcgacaaagtaagccgttttgttgtgcggctctttcgggctgatataccagatacgcgcattctgcggcgtcatcatcgccagacgttcctttactgctttagcatcgtaccgatcggcaatattgactgcatccagcgtatgctcaacaggaacgcgaatcatggtatctgccagccattcgacgtaatccatatcacgggtgatgctcggataacggaagtcgatatccagcacattcgccagttcatcgaagtattgtttatcaatgcctttttcacgtaacagattgagatagctaaaaattgccgccacaacctgatcgcgattagccaggcctttatcggttaaagacgcagagatcgctaatacgccgctgttgccgttgacgataggatcggagttggcgctaatgccctcaactaatccctgcttttgcagccagtcagaaagtgtacctgggctgcgattgccaatcagataggtaatcaattcatcggttttactacggaacttcgcactgttgttatcgatgcgaaactcaacgcgcaacactttacgcggcagcgcagggacgtaatgaatgataatgcccttttgcgcgtcggtgactaccggcacggtgatttccggttttttgctctctttgttcggcacgcgaccaaaggtgtccgccgccatttttgccaactccggcagcggtttattactgtaaataaccgccttcatcaaattggcggaatagtacttctcgtggaaatctttcagcgcctgctgcaccggattaccaggtttgtcgcttaaagtttcgaggttaccaccagaaaacttactaccggggtgtgccgggttaatggtttctgcgctgacctgtgccatgcgcatcccgtcacgcgtacgcgccatggttaattcagcgttcaccgcattacgctcacgttcggcatatttcttgtcgagcaaaggttcagcaatagcatcggccaggcggtctaccgcaccaggcaaggcgtcgttctcaacttccagatagaaagccgtgcgatacggcgcagtgctggcattgtgactaccgccgtgcattttgagatattcggccagactgtcagcctgcgggtactttttgctccccatcagactcatatgttcaaggtaatgtgccagcccctggtacgcctcgggatcttccaggctcccaacgggcaccaccagcgcgctgaggcttttaactgcctgcggatcagaaaccagcaagaccaccataccgttatccagacgtatagcctgatactggcggttatctttatcacttttacggatggtttcctgaatcggctgccatcccgtttctgcctgacttaagggtgcccaaagggcaactaacaacaataatgctttgaaccaggtgctgcggggcattcacggacctcataatcaacttaattttctgtccagattcaacacgttaacgcaaatcatctgccagaatttaatcttgtgctgcacgagtcagcctatgtttatataaccatcagtccgtgactggtgcgcatcataaagtaagcggatagattgcgcaatttttatacagcactcaactctgattaaagcgaaacagcggtaacaggaaacgttggctctgttcaacgatggcctccattgtctctggtgttaattgccgccagagcctttgataccagatatcatcaccttcgccacgcaccatcatgttgccttcgtaagcctgaaggaatttcgtacgggctttttgcaacgtggaatcgtcatccagcatggcatcgttttgcgcgtcataacaggtttttagccacgcgccgccactttcaggtaacaccagcaatggcgcggacattccttcacgatacccctcaatcagttgactgaggtaatgcaaagcctgttcggctgcaagcggcggaaaacgccactcgccgtctttgcgtagaaaaaggcgactttcaccattaccaccgctggcacagtagacaaggtgttccagccaaagttgcattccctgggccacacttaataaagagggacgccagcgcaacaggccatccggctgcacctgcggcaaccagccagttatctgcacaccgttgcaggcgagatcaatttccatactctgccccggctggcgacaggcaatgactctgtcggcaagctgctgcatctcctggcactgtgtttcccagaaaatttcaccaaaagcgccatacggtaaatcccctgccgctcggaagcggcggaacaagcgttcggcatcatcctgctcaaccagtgcattcaataactgctgattgatttgataacggctaagtccttccagaataaatggctcggtgtcggggatttcgctgtcttcagtacggaagttcacctgcaaacgcatctggaaaaatgcccgcaccggatgtgcccagaatcgttgtagcgtttccagcggcacggtttccggtaaggtaaacggcagcggctgaacaaattcagaatgtgctttaccagcctggctggccgcaggtagccattcacgagcatagctttgtcgttcgcctggctggtagttttgtggatcaaacggcatccgggtatggaggcaagtaagatgcgcttttacccttgcctcgctttcatcacagttgagcgcttcatcgcccggtagataatgactttgcccgatgtagtcgatcagttcctgcaccagtacgctcgggaaacgctcactgttatcctgaatggaacgaccgatatagctgatatagagtttttgctgcgcggaaattaacgcttccaggaacagatagcggtcgtcatcgcgacggctacggtcgccacgcttcggtttctggctcatcaggtcaaagcccaatggcgcaagctgacgtggataaacgccgtcgttcattcccagcaggcaaaccactttgaacggaatactacgcattggcatcagagtacaaatgttaaccggtccggcgagaaaacgctggctgatacgttcttgatccagacgctgtgccagttcatcacgcaatagactcagcggcaccgcgtcgccatactgcgcacctaaaccttcggcgataatcgcctgccattgttgttcgatcagcgtcatcgccgcttcggtttccgcatccggcaggaagaaggcgttgagcatatcgcgacaaaccggcaaccactcttccagcggacgctcctgtgccagcccgcgacgccagatgtttagctgcattagcagactagccagatgccccaccagttctgcaattaagccgctgctttcatcataaggtagaacgctttgccactcgccctgcgcgctctccatcgcgtagcccaacaacatacgcgtcaggccaaatcgccaggtgtgttgtccggtggcggggagttccagctcgcgaacgttgtcgtcatctatgccccaacgaatgccggattcgttgacccactggcgtaaataacgcagcccttcttcggtgatgtcaaaccgcgccgccagcaccggcacatccagcaacgccagcacatcctcactcacaaaacgactgtcaggcagacttaacaggctgataaacgcttccagtaccggatgactctgccgcgcacgacggtcggaaatggcgtaaggtaggtaacgatccgcaggtgcgctaccaaacacagcctgaataaacggactgtagctgtcgatatcagccaccatcacgatgatgtcgcgcggagtaagtgtcgggtcttcctccagcatcgccagcaggcgatcgtgtaaaacttcaacttcacgctgcgggctatggcaaacgtggaaggtgatactgctatccagtggatcaagcgggcgtttgttatcgctacgggaaaactcttcgatgttcacaccagcaacggcgcggttttccagttccagaatgtcagactgaatgttatgcagcaggttatctggcgtgacatcgacaaaggcgtccagctcctggctgctctccaggtcagaaaggagataaatgtagtcgcgcccaagcttaccccaactagccagcagcgggttgccgacatcctgttcaccatcgctgttaaagagctgcccggcattttcgctatcacgaaatagcggcaattcgcgatcttcaaaactgtgtcgacgctgacgggtcagcagtttcgccagataagcaggatctttaatatcgccccagtaataacggcaggggttggtaaacaggagatggatttcaatatgtttacccagcgcctgtagcgcctggagataaacaggcggtaacgcggaaataccgcatataaagacgcggctaggtaaccccggcgggcaggtcgtcgcggactccagcgtttcgataaagcgctgatagagattggcgcggtgccagcgcggttgcccgagttgatgggtatattccaccagcgccttccacaacggggcttgccaggcctgtgcttctcccagcccttcaaccaaatgtcctgtttcccactgtgccagccagtccggacgatagaccagatactggtcaaacaggtccgccgctttactggaaagctggaacagttttcgcttgtcgctatcgtcagtcagataatgccgcaacagggtaaagtcttcgcgctccagcaattgcggcagcagagtcatcagtttccagctcatgctctgtttgttaaaggcgctctctttggggatttccggtaacacccggacgaacatatcccagataaagctcgctggcagcggaaaatcaatgtttgccgcaataccaaacttttggctcagggtcatttgcagccactgtgccataccggtactttgcaccagaatcatctctggttcgaaaggatcgtccagccgttcgcgttcgacaataaactccatcaacgcttccagcacgtccagacgattggaatggtagacccttaacatagcggctcctgattactgacgattcgggcaatgcaggcgggtcatctcgccttctctgcccccgggactaactagcgtaacgctgatgctgacacatcccgcctggcttgtctgcattcggttgacctgccagttggcaggtgggctaatcgcgcgcagttgcgtttgctgccagccatgccgccagagctgttggtactggtttctgctggcaagactgttcattaatgttcgctggaaaccgcttaacgcagtgacaatcatcaccatcaacaccatcgccaacattacctccggcaggctaaagccttgttgattcttcagggaagcactcataacgccctctctttcagcggttaaatcagggaagctgacataacgccctctctttcagcggacaaaaatcgctccagccgcgtgggctaaaaacaatgtttccatcaatgacttcgcctgttcgccacaagctaacgccttcataaccggcaatcaataaggcttcattatctgccagtaaacgcaaacaaacctgggcatcggtttcagcgtactggctgcactgaactgctggctgcgtctgccagcagtgcatttttccccacgccagcgcgctctgaacgatggcctggcggcgcaaactctgactttccatgctcacgcgagaggcaaaactgcgatcctgttggctcattccttgtaatagcaaactacccaaaaccagcagcatcaggaccagagccagactgctaacacccttttcgcggttcacaggttgaatcctgtcacgctatagctggcattcaccacggtttgcggttcagacttactggcagcacgcatattaaccgtcaacaccgggctgaagccgctgacatcctgacgtacgacctgaaaagtgtcgataatgatggcatccggattagtgactttatcccagcccttaccttcacaggatgtcgcaccgcgtagcgtttccagcacatgctccttcagacgaaatccaatctggtcggactcttttaccggttcgcgatcccagataccgttactgttcgcatcccactgcacaatgacacagtcaccctgtccgacaatttccagcccttcgccggtacagatgccatgacaataacccgccctctggagatgcttcgcgacggtaaatacccgcagccagatttcatcttccagcgccagcttacgggtgctcgttaaactttcacgctgtaacgcaggcagaaagcgtgccgcccccagcaacaatacgctactgatcgccatagcaatcaacacttccagcagagaaaaaccttgctcttttacaggcatccttctgtttctccttgctgacaaagccggagtcttccccacgggctaaccaccagccaccactcgcccgtactgtttttgaagcgaatatgcccggcccatgcggtattgcgcaggccaaagaaagcaaggctaggtgtcaggtcgctcatttcgacttcgggccagcgtggcacaaagaccaatggactactgccatgacaggtattggccccagcagcggaactcacaaggcaccataacgtcccctccctgataacgctgatactgtggtcgcggttatgccagttggcatcttcacgtaaatagagcaaatagtcccgcgcctggctggcggtttgccatagccgttggctctgctgccagtattgccagccatagagtccacttgcgcttagcatgaccaaaatcagcatcgcgaccagcgtttcaatcagcgtataaccacgttgtgttttcatgccggcagtatggagcgaggagaaaaaaagacgagggccagtttctatttcttcggcgcatcttccggactatttacgccgttgcaggacgttgcaaaatttcgggaaggcgtctcgaagaatttaacggagggtaaaaaaaccgacgcacactggcgtcggctctggcaggatgtttcgtaattagatagccaccggcgctttaatgcccggatgcggatcgtagccttcaatctcaaagtcttcgaaacggtagtcgaagatggattcgggtttacgtttgataatcaacttcggcagcggacgcggttcgcggcttaattgcagatgagtttgatccatatggttgctgtacagatgcgtgtcgccaccggtccagacaaaatcacccacttccagatcgcactgctgcgccatcatatgcaccaataacgcgtagctggcaatgttgaacggcaggccgaggaagacgtcacaggagcgctgataaagctggcaagagagtttgccgtctgccacatagaactggaagaatgcatggcacggtgccagcgccattttatccagttcgcctacgttccacgcactaacaataatgcggcggctatccgggtcgtttttcagctggttcagtaccgtagtgatctggtcaatatgacgaccatctggcgttggccaggcgcgccactgtttaccatacactggcccgaggtcgccgttttcatcggcccattcgtcccagatggtgacattgttttcgtgtagataagcaatgttagtgtcgccctgcagaaaccacagcagttcatggatgatggaacgcaggtggcaacgtttagttgtcaccagcgggaatccatcttgcaggttaaaacgcatctgatgaccaaaaatggaaagcgttccggttccggtacggtcgtttttctgtgtgccttcgtcgagcactttttgcatcagttctaaatactgtttcatggttcctcaggaaacgtgttgctgtgggctgcgacgatatgcccagaccatcatgatcacacccgcgacaatcatcgggatggaaagaatttgccccatgctgatgtactgcacccaggcaccggtaaactgcgcgtcgggctggcggaaaaactcaacaatgatgcgaaacgcgccgtaaccaatcaggaacaaaccactgacagctcccattgggcgtggtttacgaatatacaggttgaggataataaacagcaccacaccttccagcagcagctcgtaaagctgacttgggtggcgcggcagcacaccgtaagtgtcgaaaatggattgccactgcgggttggtttgcagcagcaaaatatcttctgtacgggagccagggaacagcatggcaaacgggaagttcgggtcaacgcggccccacaattcaccgttaataaagttgcccagacgcccggcaccaagaccaaacggaatgagtggtgcgataaaatcagagacctggaagaaggaacgtttagtacggcgggcgaagataatcatcaccacgataacgccaatcaggccgccgtggaaagacatgccgccgtcccagacacggaacagatacagcggatcggccataaactgcgggaaattgtagaacagaacataaccaatacgtcccccgaggaagacgccgaggaagcccgcatagagtaagttttcaacttcatttttggtccagccgctgcccggacgattcgcccgtcgtgttgccagccacattgcaaaaatgaaacccaccagatacatcaggccgtaccagtgaagcgccacgggtcctatactgaaaatgaccggatcaaactccggaaaatgcagatagctactggtcatctgtcaccacaagttcttgttatttcgctgaaagagaacagcgattgaaatgcgcgccgcaggtttcaggcgctccaaaggtgcgaataatagcacaaggggacctggctggttgccggataccgttaaaagatatgtatatgatccgcgttataaccctccgcgaatcagcccgcccatgccgcgacgctccataaaggctgcaacctgatggcgaacttcggtcgccagttgcgcttccagactacgctgcgcaagattttctgcttcggcataatcaatgcgccgcagcaggtattttgcccgcgctacagaacgtccgttcatagacagatggcgatacccaagcccaatgaggattgccacgcacatgggatcgcccgccatttcaccgcacaaacggagatcgattccatgtatttccgcttcccgggcgatcatcgccagagctcgtaacattgcaggatgaagactgtcataaatgttcgccacccgggtattgttgcgatcaacggccagaatgtattgagtcagatcgttggtgccaacagagatgaaatcgacccgctttgccagatgcggcagcataaataccatactcggcacttccagcatgatgccgatacgtggtttgggaatttcgtaaccgatcatctcctcgacttcacgtccggcacgttcaatcaggcggcgtgcttcatcaacttcatcgaggcttgtgaccatcggcaacagaatattcaggttgcccgtagcggcattagcacgcagcatcgcccgcacctggatcaagaagatctccggctgatcgagcgtaatgcgaatcccacgccaacccaggcatggattctcttcgctgatcggcatgtaaggcagctgcttatctgctccgacatccagcgtacgcaaggtgacgggtttatcattgaacatttgcagcatcccctgatactgcgccacctgttcttcttcgctcgggaaaccactttgcagcatgaatgggatttcagtgcgataaagaccgatgccatcaatacggctgcccagtttttcttcatgttccgggcttaaaccagcattgagcatgacttttatacgctcaccgctttttaactgcgcgggtaaattgacgtcatcttccgccagacggctaagctcaatctcttcactaattagccgctgatattcttgcagcagtaccggctccggatcgaccagcaattcaccgcgatagccatcaacgatcagcgtcctacgatgcagcacgctaggctgaatatccgcgcccatcacggtagggatccccagcgcacgtaccatgatcgcagcatgggagttggctgcgccatctcgcacgacaacaccgactaagcgatcctggggcagctcagcaagcgttgtcgcactcagttcatctgccaccagaatgaaacgttccggccaggcgttcggcccttgattagcgtcatcaagatgaaacagcaatcgctgacccagcgcacgtaaatcgccagcccgctctttgagatagttatcacttagcgcggcaaactgttcggcaaatttttcaatgaccgtttttaccgcccactctgccacgctgcctttatcaacctcggcaaacaattcgcgacgcagccgggtgtcgctaagcaggtggctgtaaagatcgaaaatagccgccgtttctttttgtgcaccggcggcaaagcgtttgctgtagcggcgaaactcgtttgccgcttcttccagcgccccggtcagtcgttcgcgttccagagccggatccagcgtacttgcctgatacacctgttccattaaaggtaacgtggcatcctgccagccttcggcaatcgccacaccaggtgctgccggtaatgcgcggattcgcgtctggcgatattgcccaaacaaggcagtcaactggctctgagaaagaatagctgccatctgggtggcaagcgtcaccaggaaggattcttcactttcgtcatactggcgcaactctcgttgctgtaccaccagtacaccaagcaactggcgacgttgaataattggtacgcctaaaaacgcgcggaaacgttcttcttttacggaggggatgtatttgaagctggggtgcttttgcgcatctgcaaggtttatcggttccgccagcctgccaaccaggccgacgatcccttcatcaaacgcgagcgttacagtgcgaccgcgtggttttttcagcccccgggtcgccatcaggtagtaacaacgtcgatcatgatcggccaggtagacgctacagacctcggtatccatcgcaagacagatgtcggtaaccagaatatttaacgcctcattcaggcgtggtgcgctggctaccttttcgactatttcgcgcaggcgagtgagcataattggcgtgacttaacctcttttacgtcgataagcagatgcgttttgtggttttggcgtattttcctgcagactcatcaccacactcgcgaactctttcattaccctacggtagacatcacgtttaaaactcaccacctgtctgaccggataccagtaacttacccatcgccagccgtcaaactctggtgtactgctggtttgcatattgatttctgcatcgccgctcaccagctgcaagagaaaccatttttgtttttggccgatacaaaccggcttcgtgtcccaacgcaccaaacgtttcggtaatttgtagcgcaaccagttacgcgtactagcaaggattcgaacgtctttgcggcttaatcctacttcttcaaacaattcacggtacatcgcctgctctgcggattctccggggttgattccgccttgcggaaattgccaggagtgctgaccaaatcgccgggcccacattacctgcccctggcgattacaaatcacgatacctacgtttgggcggtagccatcgtcatcaatcaccggactacctcaaaataaagctttatatacgaatgattgtttcatactccaggaagacggtaaaccactctctgcagggcattacacactaataacaattgaataactcacagttatgtgcagagttataaacagaggaaggggtggatagccgtttttattcaccttttctgtggatagagttgtgaagaactacggaattactacgggaaaacccggagcattctgaataagcccgatatagacattttaaaatattcattatcagtcaatgcattacatgtaattttagtaatgaaaaagagtaattcgtgacccaggtcacacctctcatttacgggttggcgaaagatcaaccaatgccgtatttatccacagaatgtgccactaagttaagcactgaaccactaaaaactggagtttcgtcgcacgtcaaggctgtaaatggaaacagtagtggaggtttttcacagttatcccagctttctgtggataacatggtgtaagatcctgtttattttcagtgaccagatttggaaaacccgttgcagtgttgcgcaactcgattaccggcaacctaaaaagcaatataaatcagagaattgaacaacgcatgtggaaaaagttacactgcgaatattcggcacataattgctgtttgttttttaatcaaggtatcatgacatgtcccaacctcgcccactgctctctcctcccgaaactgaagaacagttgttagcgcaagcacagcaactttctggttatacattgggagaactggcggcacttgtcgggctggttacgccagagaatttaaaacgcgataaaggctggattggcgtgttactggagatctggctaggtgccagcgcagggagtaaacctgagcaagattttgctgctctgggcgtggaacttaaaactatccctgtggatagtcttggtcgtccgctggaaacaacattcgtttgtgttgccccgttaacgggcaatagcggggtgacctgggaaaccagccacgtgcgccacaaactcaaacgcgtactgtggataccggttgaaggcgagcgcagcatcccgctggcgcagcgtcgcgttggaagtccgttgctgtggagcccgaatgaagaggaagaccggcagctacgcgaagactgggaagaattaatggatatgattgttctcggtcaggttgagcggattaccgctcgtcacggggagtatttacagatacgaccgaaagcagcgaatgcgaaagcgcttaccgaagccattggtgcccggggcgaacggattctgacgctgccacgcggcttttatttgaagaagaatttcaccagtgcactactggcccgtcattttctgatccagtaaccatcgctttgacctgccgctttccgggcatataattaccgcttcatttttttggcagggctttttagatgttatttgcatggataaccgatcctaacgcctggcttgcgctcggtacgctgacgctgctggagatcgttcttgggatcgacaatattattttcctttctctggtggtggcaaagcttcccacagcacaacgtgctcatgcgcgccgtctggggttggcgggagccatggttatgcgtctggcgctgctggcaagtatcgcctgggttacgcgcctgacaaatccgctttttacaatattcagtcaggaaatttctgcccgtgatttgattctgcttctgggtggcttgttccttatctggaaagccagcaaggaaatccacgaatccattgaaggtgaagaagaagggctgaaaacacgcgttagtagtttcctcggcgctatcgtgcagattatgctgctggatattatctttagcctcgacagcgtgattacggctgtgggtctgagtgatcacctgtttattatgatggcagccgtggtgattgccgtaggcgtgatgatgttcgccgcgcgcagcattggtgattttgtcgaacgccatcctagcgtaaaaatgctggcgctctctttcctgattctggtgggctttaccctgattctggaaagtttcgacatccacgtaccgaaaggttacatctacttcgcgatgttcttctctattgcggttgaaagcctcaacttgattcgcaacaaaaagaatccgctctgatactccgtacgctctcctgcgggagggcgtactcactccttttaccctcacagtttaagattttcctgctttcaagatatataacgtcggtttataaacagactattatcataggtaggccaaatgaggataaccggatgaaaaaatgggcagtaataatttctgcagtcggactggcgtttgctgtttccgggtgttccagtgattacgtcatggcgaccaaagatggccgtatgattttgaccgatggaaaacctgaaattgatgatgataccgggctggtgagttatcacgatcagcaaggtaacgcgatgcaaattaaccgtgatgatgttagccaaattattgaacgttaacaaataaggtcagcatccggctggccttaagatttttctctttcccttttcccttccctctgccatttttatattccttatgtcgtgattataaaaaggaaacggctatgcaatatcaccgtataccccacagtagcctggaagtcagcacgctggggcttggcacgatgacgtttggtgaacagaacagcgaagccgacgcccacgcacaactcgactatgccgtcgctcagggcattaaccttatcgacgttgccgaaatgtacccagtacctccgcgccccgaaacgcaagggttaaccgaaacctacgtcggcaactggctggcgaaacatggcagccgcgaaaagttaattatcgcctccaaagtgagcggaccgagccgcaataatgacaagggcatccgcccggatcaggcgctggatcggaagaatatccgcgaagcgctgcatgacagcctcaagcgcctacagactgattacctcgatctttatcaggtgcactggccgcagcgcccgaccaactgcttcggcaaactcggttatagctggacggattctgcgcctgcggttagcctgctggatacgctggacgcactggcagagtaccaacgcgcgggaaaaattcgttatatcggcgtgagcaacgaaactgcatttggcgtaatgcgctacctgcatctggcggacaaacacgatctgccgcgtattgtcaccattcagaacccttacagtctgttaaaccgcagttttgaagtaggtctggcagaagtcagccagtatgaaggggtcgaactgctggcctatagctgcctgggtttcggcacgctgaccgggaaatatctcaatggtgcaaaacccgctggcgcacgtaatacgctctttagtcggttcacccgctatagcggtgagcaaacgcaaaaagccgtcgcggcgtatgttgatatcgccagacgtcatggcctggaccctgctcagatggcgctcgcgtttgtacgccgtcaaccgtttgttgccagcactctgctgggcgcaaccacgatggatcagctgaaaactaacatcgaaagtttgcatctggagttaagcgaagacgtattagctgaaattgaagcggtgcatcaggtttatacttatccggcaccataagattaacgccggttaaaaccggcgttaaatattaatgacggcgctgccagatccacagcgccgttattgccagcgcaaacagcgcaccgaagccaatgccaatgggcacgaccgggatgcctatcattaccgccaggctgtaaatgcccagcatcaacaacatggcgctgttttcgccaaggttttgtactgcaatcgcattccccgccccgacgctttttttaccccgctcctgtagcaacgcattgagcggaacgacaaaaaagccccccatcacgccaatcagcatcaacaaggcataggctggcagcagctcgtgttgcagggaaaaaatcagtaccaccacgccaatcaaaatcccggctggcatacagcgactcacggtttccagcgtaactaacttcgctgccgcacctgcgccaaccacgataccaatcgctaccatcgcgttgagataggtgggcgtagcgttatcggtaatgcccagcgccaccggtacccacagcaccaacaggaaacgcagcgtgacacccgctccccagaataaactggtgcccaccaggctaaaacgcgtttcaccattgcgccataggctggtgcaggcattcaggaaactgcgggtcatgttgatgagattccaggactgccccggacgcgccgccgccagtttgggaatgtagatattggcaacgaccgcaccaccgtaggccagtgcgcatgcggccagggcgacgaggacatgccagtcagccagcacaccaccggctacggaaccgagcaaaatcgccgctatggtagaagcttccattaaaccgttagctttcactaacttactacccgtggttaattcgccgagaataccgtatttcgccggactataggctgcagcaccaacacccaccagcgtatagccgagaaacggattgataccaaagcagatactggctgcgcccagcagcttcaggccgttggcaaacatcatcacccggcctttggcgaagctatccgccacctgcccgacaaacggcgcaaaaagaatgtaagcacctacaaacaccatttgcaggatgggctggctccactccggatagaactgcgctttcagtaacgccagagtggcaaacagtagggcattatcgccaaacgcagagagaaactgcgccacgataaccgctttcatccccttgctccacaagctagtgttagtgtgcacactctcactcatcgtgttgttccgcttcgtctacccagcttttcaacgtgacaaagtcaggtttgccgctgccaagtaatggcatctgtttcagatagcgaatatcgcgcggtacagcaagctccggcacgccgtgctcgcgggcatactgttgcaacttatcgcgcgtcagttcgttatctgtggtgaaaagcaccagtgcctcgcctttgctggcatcgctcttaatcgcagtggcatggactttatctgggctaacaccaagtgccagttgttccaccatttccaggctcaccatttcgcctgcaattttggcaaagcgttttgcgcggccctgaatctgcacaaagccctgctcgtcaaaacgcacaatatcgccagtgtcataccagccgcgctccatttcgccgcgaacattctcggcggtgggcacttccagtacacctggcttctccacccgcagatagccgttcattatgttcggccctttcagttgcaggcgtccgccctcttcgataccagggacgctcaacaggcgcgcatccattcctggtagaatacgccctaccgtaccgggtttcgccgccatcggtacgttgatagaaacgacaggcgcgcattcggtcacgccgtagccttcaaggatgcgcaggccaaatttatcctgccaaagctgtttggtactttcttgtaatttttctgcgcctgccaccacatagcgtagacgatagaagtcatacgggttggcgaaacgcgcgtagtgaccgaggaaagtgctggtgccgaacaacacggtgcaactgcggtcatacaccaactccggcacaatgcggtaatgcagcgggcttggataaaggaacacttctgcacctgtaagcagtggcgtaaacaggcctaccgtcagcccaaaggagtgaaacagcggtaacgcgctcataaagcgatcgttggtggtgaagtcggcaatcgttttaatctgctcgacattcgccagaatgcttttatggctatggacgacgcctttcggatggccttcagaaccggaggtaaaaaggatcagcgcctcttcttccggctgctgtttaacctgtgccagacgcggcatcagcaaatgagcgaagatccatactttgtcggcagtggtgacatctgcttttaaatcttccagatagacccagcgcacctgagtaagttgctccggcagatgccagagtttgcctttatcgagaaactggcgggaagtgaagatggttttgatttcagccgccgtaatagcactggtcagcccttttaccccggcagtgtagttcatcattgcgggcatgcggcgacgggcgatggccccaaaaatcactgccgcactgatgcctgcattgggcagcattaagccgatgcgttcgccttcaacactgtatttttcaaggatgcgtccaacaaacagcgttttcgtaagcaatttgcgataggagtctggggtaaagttgacgtcttcgacacatttcttcccggctccgaagcggtacattgcactcagtaaagattcgtacagcgtttcacgcgggcgcaccgccattcgcgcttccatcattatttgatgcagcatttcgccagcgattttgcgacggtcacgggcacgcggcgcatccggcatcgccacctgcgttggtggcaaaatatgcagagtaatttgcgggaacaagcgacgtttaaccagacctttcaggcggctgaagtgcgtaagttccgccccttcaatacgcacaggaataaccgttgcaccagacttcgccgcgacaaaacccgcgccatcgtagattttcatcaggctgcctgtcgtggtgatgcgtccttcagggaaaatcaccactggtcggccctgttccaccagacgtaccagatgtttaatagccataggttgcgtcgggtcgagaggaacaaagtcgataaaacttttcagccaacgcatataccactgttggcttatactggtgtaaacggcaaacactggacgcacaggtaaaaacagtccaagcaaaatgccatcaataaaagagacgtgattaggcgtaattagaacgcgctcgcccttcagtgcctgggtgtcacccgtaacgcgaacgcgatacaaaacacggcacaaatttcgaaaaaagctaaaaagcattccaactccctttgctctgattcagtaaaagcgaatggagggagattacacgagataaagaacgcgagcgacagtaaattaggtgcgaaaaaaaacctgcgcatccgcgcaggttggtgcaagagacagggtacgaagagcgtaccgaataatctcaccaatcaatacctctgggatcttgattgtggtctgcacgacgactcttcgccagcgagaaaacgcaaaggaatgaagggaaatgcaacgaggtgtgtaaattgtcggttactgttacagattgatgaccggcaaaaaaaacctgcgcatctgcgcaggctggtgtaattcatgtgctcaacccgaagttgacttcacctatcaatacctctgggatcaccactttagcaacctgaagccaaacgccaccagcggtcaatcgcaacagcgtttcgcaaagtgtaaccaaaggtttgcaatctctttttttgtcttacttatttgcgtttggctcacattcccacgatgaaaacacgccaccccttgaaccaacgggcgttttccgtaacactgaaagaatgtaagcgtttacccactaaggtattttcatggcgaccataaaggatgtagcccgactggcaggcgttagtgtcgccaccgtttcccgcgtcattaataatagtcccaaagccagcgaagcttcccggctggctgtgcatagtgcaatggagtctcttagctatcacccgaacgccaacgcccgtgcgctggcgcagcagaccactgaaacggtcggtctggtcgttggtgatgtttccgatccgtttttcggtgcaatggtgaaagcggtcgaacaggtggcttatcacaccggtaattttttattgattggcaacggttaccacaacgaacaaaaagagcgtcaggccattgagcaactgatccgccatcgctgtgctgcgttggtcgtccatgccaaaatgatcccggatgctgatttagccagtttaatgaaacaaatgcccggtatggtgctgatcaaccgtatcctgcctggctttgaaaaccgttgtattgctctggacgatcgttacggtgcctggctggcaacgcgtcatttaattcagcaaggtcatacccgcattggttatctgtgctctaaccactctatttctgacgccgaagatcgtctgcaagggtattacgatgcccttgctgaaagtggtattgcggccaatgaccggctggtgacatttggcgaaccagacgaaagcggcggcgaacaggcaatgaccgagcttttgggacgaggaagaaatttcactgcggtagcctgttataacgatagtatggcggcgggtgcgatgggcgttctcaatgataatggtattgatgtaccgggtgagattagcttaattggctttgatgatgtgctggtgagtcgctatgtgcgtccgcgcctgaccaccgtgcgttacccaatcgtgacgatggcgacccaggctgccgaactggctttggcgctggcggataatcgccctctcccggaaatcactaatgtctttagtccgacgctggtacgtcgtcatagtgtgagtactccgagcctggaggcaagtcatcatgcaaccagcgactaaccgcagttaaagcaattccagcgccagtaattcttcgatggtctggcgacggcgaatcaaccgcgcctgaccattatcaaacagaacttctggtaacagcggacggctattgtagttggaactcatacttgcgccatatgcccctgtatcatgcagtaccagataatcacctgccttcacttccggcaaggcgcgggtttcaacatttcccccttcctgctgggtaaagacatcgccgctttcacataacggtccggcgacgacggtttccaccgttggcgcgtgttccagagaacgaccatcagctgccagggcactgatatggtggtaactaccgtacattgccgggcgcatcagatcgttgaacccggcatcaaccagcacaaagtggcggctccccatttgtttgacgctccgcacctgagtaattaatacgccagactgcgctaccaggaagcgacccggttcaatttccagtttcacagggtggcccaaatggcgggcgatttgctcacgcgcggcattccacagaccataataatgttcggtatcaaccgcctcttcaccctgttgataaggaacagaaagcccaccgcccgcagaaatagcctgtaaatcctgaccgaattcgatgacctgacgcaccatagcaccacacacctgttccagatgggcataatcaacgccagaaccaatgtgcatgtgaatgccgaccagctgcagatgatgacgttgtatcacgtccagtgcggcgggcagatcggtgtaccagataccgtgcttgctgttttcgccaccggtattggttttttggctatgtccgtgaccaaaccccggattaacgcgcagccatacccgatgccctgggctaacctggcccagttggtcgagcatatcaacagaacccgcattcaccggaatttgcaattcactgacgcgttcaagcgtcgcctgatcgataacatctgccgtaaaaacaatatcatcggggtgcgtttgcggattgtaacccgccgccaacgcacgctctatttcgcctaagctgacggaatccactttcacgccctgctcacgcattaagcgcaaaatatgaatattggaacaggctttctgtgcaaagcgcaccacatcaaactgtttcagcgctgcaatctgccgacgaataatttgcgcatcgtagacccacaccgggcagccaaattcagcgggcaaacgcagcagattttcggcggtgagatcggtatcggtgctgaacagactatgtggcataacaaactccagataagtgcttttttatgattacgccacatcataaaaagaataaaaaatatcgatttatgtcgagtctatgcaaaaatgatatggattaccggattgcgagagagcgctaatggccgccgttaacttacgtcatattgaaatttttcatgcggtaatgaccgccggaagcctgactgaggcggcacacctgctacacaccagtcagccaaccgtcagccgcgaacttgcgcgctttgagaaggtgatcgggctgaaattgtttgagcgcgtacgtgggcgattacatcctaccgtgcaaggactgcgtctgtttgaagaagtgcaacgatcctggtacggactggatcgcattgtcagcgccgcagaaagtctgcgcgagtttcgccagggagaactgtctattgcctgcctgccggtctttagccaatcttttttaccgcagctcctgcaaccctttctggcacgttatcccgatgtcagcttaaatatcgtgccccaggaaagtccgctacttgaagagtggctcagcgcccagcgtcatgatttaggactcactgaaacgctccatacgcctgcgggaacagaacgtaccgaattactctctttagatgaagtgtgtgtgttacctccgggtcatccgctggcggtaaaaaaggtattaacgccggatgattttcagggtgagaactacatcagcctttcccgtactgacagctatcgccagttgctggatcagctatttactgaacatcaggttaaacgacgcatgatcgtagaaacccacagcgccgcgagtgtctgcgcaatggtacgggcgggggtaggtattagcgtggttaacccgctcaccgcactagattatgcggcaagcggtttagtggtgcggcggttcagtattgcggttccgttcaccgtcagcctgatccgccccctgcaccgcccgagtagtgcgctggttcaggcgtttagtgggcatttacaagcggggttaccgaaactggtcacttctcttgacgctattttgagcagtgctacgacagcataattagctcagcataaaagcgacagcatcctcggcatggatcgccgcggtatcaaacacaggcaaaacactgcgctcttctggcaccagtaaaccaatttctgtgcagccaaaaatgacgccctgtgcgccctgttctgcaaggcgagcaatcacttgcgcacaataagcgcgactcgcttcggtaaattgccccagacacagttcttcaaaaataatctgattaattttcgcccgttcatccgcttcaggaataagacaattgatggaaaattgttccgtcagccgcccgcgataaaaatcctgttccatggtgtaacgcgtacccagcagcgccacacgagtcattccggccccggtaattgcacgtccggtggcatccgcaatgtgtaagaaaggcagagtgcaacgactctcaatggcatccgccactttatgcatcgtattggtacatagcacaataccttctgcgcccgcccgctgtaagccaagcgccgcctcagccagaatgtccccggttttatcccattccccgcgacgctggcactcttctatttcatgaaaatcgacgctatgtagcagcacttgcgcagagtgaagcccaccaagccgctgtttaatgccttcatttatcaaacgatagtaaggaatggtggattcccagctcattcctcccagcaaaccaattgttttcattcctctctcctgatgtgtgttaccgcaacaaggctgaataaggaacgagacaaacgcctcaacggccaagtgcccaatctctattaacgaaaaaagggccggatgtacagcacatccggcccgtgaaatcagacgccgatatttctcaacttctcgcctgccatcagtttgcgttcgatatgttccagcgtgacatttttggtttccggaatgagccagaaagtaatgcccacaaacgcaatgttcagcgcagtgtagagccagaacgtaccggcagcgccaatgctatcaagcagtgtcaggaaggtcgcgccgataatcatattgctcacccagttcgtggtggtgctacaggtaataccgaaatcgcggcatttcagcggctgaatttcagagcacaggatccacaccactggcgcggcgctcatcgcataaccggcaatacacatcatcgtcatgccaacagagagccaggacaagccactggaagccgtaccgttatcaaactgcatcaggcaatagcccagcaccagagtgcctaacgccatcacgctgaaaccaattttcagagccggtttacgccctgctttatctaccgtaaacaccgcaataaaggtggcgaacataaaggtcagccctacgaccagagtcgcaatcatctgttgttctgtggtcgtaaagcccgccattttgaagatacgcggcgcgtagtacatgatgatgttcataccggtaaactgctgcatcgcctgcaacaacataccgagaaacacagcacgacggacgttacggttgatcttaaacagtgcccaaccgccctgttttaacttcaggctttcacgaatttcgttgagttcttctcgcgctttttcgctcgtatcgcgcagcatacgcaatacttcttccgcctcaatatgacgccccttttccgccagccagcgcgggctatttggcaggaagactaccagaataatcagcagaactgctggtaaagcaagaacccccaacattgcgcgccagttaccgctataactgaacgctgtatcggataaaaacgccagcacgatgccgagtgtgaccatcaactggtacatactgatcatcttaccgcgaacgttttcacttgccatttcagaaagatacagaggagcggtgtaagacgcgatcccgacagcaatgcccagcaccacacgagcggcgattaacatctctacgctggtcgcaaaagcggaccctatagaaccgagtacaaacaggatggcccccgccatcaggctgtatttacgccccaggcggaagctcagccaaccattaaacagcgcaccaattgctgcaccgagcatcatgctactaaccacccattcctgcaaacgactggtcagcacaaagtgatcggtaatgaacggcaacgctccggcgattacgccgatatcaagaccaaataacaatcctgcgaccgcagcagctacgctaacaaacatattcatacgccgcgtatcccgcaaagaacgtggcgttaaagcagattccgtattgatagtaaccattttttcctgccagcagagagtaagacatagtgaaaaaatacgtgaacaactcacgcaggtgtcaggtcggaaacagcataaatatggattaaattgctgcgacatgtcgttatgtgatggatattccaattttcaaattaagttgaattattgagattattattaaccacctaattttacagcagataaaattcataaagttcattaattgataattaatatggattatttcataaccatgatatggattatgatgatctacaggtataaaaaaccctgccatgcggcagggtcataaaagtaagaagaatgaattaacgcgccagccaaccgccatccacggcaatggtataaccattcacataatcactagcgctggaggcaaggaacactatcggccccatcaggtcactcggcagtccccaacgaccagctggaatgcggtcgagaatttccgcgctacgttgttcatctgcccgtagttgttgagtattgttggtcgccatgtaacccggggctatcgcattaacattaatgttgtgtttagcccattcgttcgccatcaatcgcgtcacacccatcacgccgcttttacttgcggtataagaaggcacacggatcccgccctggaaggagagcatactcgcgatattgataatcttgccgccattgccttgcgcgataaagtgtttcgccgctgcctgagacatgaagaatacgctcttgatattcaggttcatgacatcgtcccagtccttttcgctgaactcgagagcatcttcgcggcgaatcaatccggcgttattcaccaggatatcaatatgaccaaactccgctaccgcgcgatccagcagtgctggaataccatcaatctttcgcagatcggcggtcaggcttaaaaaacgacgccccagcgctgtgacctgctcgatggtttcagtcggttcaacgatgttaatgccaacaatgtcacagcccgcttgcgccagccccaacgccatcccctgacccagtccagtatcacaaccagtgacgaccgcaactttaccttcgagagaaaatgcacttaaaatcataacaataccttattcgtttatgcccacaattagcgcaaatctttaacggccacatggtccatatcatcaaagacctggttttcaccgaccatgccccagataaaggtataagctttggttccgacaccggaatggatgctccagctcggggagatcaccgcctgctcgttatgcatcacaatatgacgcgtttcttgcggctgccccatcatgtggaaaacgcaggcgtcatcatccatattgaaatagaaataaacttccatccggcgctcgtgggtgtgacacggcatggtgttccacaagttacccggagccagctccgtcagccccatactcaattggcaggtttccagtacatccgggacaaaatatttgttaatcgtgcgacggttactggtgaggttatcgcctaacgtgactggagatacttcgtccggtgtgacttttttggtgggatacgtcgtatgcgcgggtgcgcaattgtaataaaacttcgccggagtgccggtatcaatactggcaaagacaacttcttttgcacctttaccaacatacagggcgtcgcggtgaccgatttcatagcattggccatcgacagtaatcgtaccggcaccgccaatattgataacacctaactcgcgacgttcaaggaaatagcttacgccgagttgtttaccaacttccccgccaacggaaaccgttttagttatcggcataatgccgccaacaataattcggtcaatgtggctgtaaaccatggtgtactcatcggcgacaaataccttttcaaccaaaaattcattgcgcagcccttgggtatccagcgtttttgcgtgcgcactgtggatgctctgtcttacgtccacatcaacctccgataatcagtgaagcgtgaaaatagaaaacgatagtgaaacactgtttcgttttctctataaagggatgatatgcccatgggctagggttttcaattaaaaataaaacaatgtttcatttttaagttaaggattaaaaaaagtgcagtgtcgatcacgaatatgtcatgagaatggaaaaatgagggagcccagaaaatgtatgtcgacttgccagccatcattattcaacagattaatgacggcagatatttatcggtaaggaggaaatgcagagttattcgtcacgttcaatggtcaatgccacaccctggcccccgccgatacaaagcgttgccagtcctttgcgggcattacgtttcaccatttcatgaaccagagaaaccaggattcggcaaccggaagcgcctatcgggtgaccgagtgcgatcgcgccaccattgacattgacccgacgctcatcccactcaagcatcttgccaacgctaagcgcctgtgcagcaaacgcttcattagcctcgataagatcgacttcagccaactgccagcctacacgctccaggcaacggcgggtcgcatacaccggcgcaattcccatcaatgccggatctacaccaacgctggcaaatgcgcgaatgcgggccagcacgggtaaattcaacgctcgtgctttggcttcgctcatcatcattaccgcagctgcgccatcgtttatggaacttgcattacccgctgtcacagaaccgagactatcaaaactaggatttaaacgggctaagccttctgcgctggcgtcagtgcgtggctgttcatcggtatcaacaaccaacgtctgcccgttactttgggtcattaccgggacgatctcatctttaaatcgtccggcgtcaatcgccgctcgcgctttttgttggctgctaagtgcgtaagcatcctgcaactgacggctgatgccatattcgcgagccagattttcggcggtgacaccaatatgataatcattgaaggcatcccacaacccatcatgcacaagactgtcaaccaactggctattgccaagctgtgcaccggtgcggctatcagtcagaacatgtggtgcgcggctcatgttttcctggccaccggcgatgacaatatcagcctcgccacactgtatcgcctgagtagccagatgcagtgctttaagcccggaaccgcaaacgtcattaatagtgattgcagaaacgctattaggcagaccacctttaatagcgctttgccttgccggattctgccctgcccctgcagtcaacacctgaccaagaattacttcatccaccgcatatgcaggaacgccggtacgttctattaacgctttcacgaccagactaccaagttccacggcggaatgacccgctaacgcaccacgaaagcagccgataggtgtccgtaacgccccgacaatcacaacgtctttcatcacaacctcgcaccaattaacagtgcaatagtaaatgattgttaattacagttatcttaattgtttaaaaaaagtgatttttatcacaaaggaaatatgcctgagcagcagtcagagacataactggcacgtaaggtttgcaaccactaacccaccaatagaggggtagatagggcgttaatctcccatacttaacctggtttatggtaaattgccctccattttgtttaatttgtagatgatacgttcagataatgtctaatatttggtctaaagaagaaactctgtggagtttcgcgctctacggcacagccgttggtgcaggcacgctcttccttcctattcagttaggtagcgcaggggctgtggtcctgtttattactgctctggtcgcctggcctttaacatattggccacataaagccttgtgccagttcatcctcagtagtaaaacaagtgcaggtgaagggataacgggcgcggtaacacactactatggcaagaagattggtaatctgattaccacgctgtacttcatcgccttttttgtcgtcgtgttgatatatgcagtggcaattaccaacagtcttacggaacagctggcaaagcatatggttattgatcttcgcatccgtatgttggtgagtctgggtgttgtattaattctgaatctcatttttctgatgggacgtcatgccactattcgggtaatgggatttttggtattcccattgattgcctatttcttatttctttccatttaccttgtcggtagttggcaacctgatctattaacaacccaggtagagttcaatcagaatacccttcaccagatatggataagcattcccgtgatggttttcgcctttagccatacgcccattatttctacgtttgccatagacagacgtgaaaaatatggcgaacacgctatggataaatgcaaaaaaattatgaaagtcgcttatctcatcatctgcataagtgtactgttctttgtctttagctgcctgctttctattccacctagctatattgaagctgctaaagaagaaggggtcaccattttaagcgcgctttctatgctgccgaacgccccagcatggttgagtatttccgggattattgtcgcagtagttgcgatgagcaaaagtttcctgggtacgtactttggcgttattgaaggtgccacagaggtcgtcaaaacaacactacagcaggttggtgtaaagaaaagtcgtgcatttaaccgcgcactaagtattatgttggtaagcctgattaccttcattgtttgttgcattaacccgaacgcgattagcatgatttacgcgatcagcggcccgctcattgccatgatacttttcatcatgcctacgctgagtacgtatctcatcccggcgcttaaaccctggcgttccatcggaaatctgattacgctgatcgtgggtatcctgtgcgtaagcgtaatgttctttagctaatatcagttgtggatggttcaaaattgctacaattttgaaccattccatttttcataatattcatttgttattattccaccctatcacttctctcgtcatatcctagtattatcagttagttaaacacacaaagagatctgaacatcttaaataagactatttaagatgcataacttagattcgcaagatatcttctggtcattcaaaaacaatttgcgatatagatattcttataccatgagatagttatctggaccgctctcaaccatgcaagattaaatcagtgaaacataatcatatttgataacgagaaatgcatttttaaatgccttactcagaattatagcaaatacagattaatcgcaatttttcccggcaaaattacaaaatcatggtgtattgacatcatcaataaccaatgaaattatgcaattatatacggatagggaggttcttaacatggggctttgtagtcgttataaaagtcttacatgcaatagttgcagtatgcattgccaaataatgccagaagagagtccgcgtttgcagtattgcgcaaacagctgtttttgtatgtggcccgaagaaagtagttattttaatcgtggtgtggtagaaggtatcttaacaaaaaaccacaatgcgagattaagcggatatatttttgtcgattttagtgtaagttttttacgtctattccttgaaaaagactggattgactatcttgcaagtactgacatggggattgttttagtcagcgaccgcaatatgcaaagcttagctaattactggcgaaaacacaacagtgcaatatctgctgtcatatataatgatgatggtcttgatgttgccaatgaaaagatcagacaactatttattggtcgttatttaagttttaccggaggtaacacattaactcagatggaattcaccataatggggtatatggtttctggttataatccatatcagattgctgaagttctggatatggatatccgtagcatctacgcgtacaagcaacgaatcgaaaagagaatgggtggtaaaataaacgaattatttattcgtagtcatagcgtccaacattgatactcaacgaccagccagaatcatactctgtttatacgggcatttattgaaatgtccgtattttataaataggccgtcccctcaagagtaaacaccatagtatttaaaaccatcacacgaaaaattcagaagcattacgaaatatgaatttacaaacaatagtggcataaatgttaaccatgttaatttacgtaaagttttacgttgcaacattaaagcctcatttcaatcatcatgataaatataaaattaatatatatttatgccgtaaataccaatatacttagcaaactatgtgatctccatttcgattgatttagtgtttattgacgtatgtactggattattaacgataatatcgagttctggcctgagcaccgaaaattaataagcgtacataacgccgatcttaacgtcgttctgacaacgccagccagtcgatgtttaagtcttctacttgaagcttttcctgatgtggttgcacaacaagattttttcaccagagtctgggaagaagaaggtatgcgtgtgcctactaacacgttatatcagaacatatccattatcagacgcggatttcgcgctgttggtgatactacccacagcctaattgcaaccgtgccgagaagaggattcaagatccataatgacattaacatacaaaatcatgtaataaacagcagtacagacgcacatacacacaatgccccacctgccataaaagttaatgcgggatacaaagagagcattggtggcgcaaagaatttcaataacaaaatcctcaaacatataaaaagtcatctaattatgttgagcgcatttgtcataggcgcatattctgcatattggctatggaataataatcaaccgaagccatttttcaaggattacaagactgttgcggaaattaatggctgccattttaatgtaacagaagatacaattgatgggttgaaagagttcgataaatataaaacacggatactggatagcgggattaactgtaaaaaacatccgtggttatacttccctcttgcaaaatccagtccggggatgattgttatggcatgcaataaaaactataaccaacatgaagtggcaaactgtttaaccctgtcttaccgtgaggttaatcgtgattgattataaaaaaaacttattatttattttagtttttatcagtgggtttattctcttcactgtctattcttacactgcagaaaaaatgatatataacgaaacatgcactgcaaattgggtaatttttaatgaccagggacgagcaaatcttaccatcgactttatgtataacaaaaaaaataaaacaggaactgttgcgttgagtggaacctggcaacaaggtaacagagaaagtaaaagtatacggcgaaatattgaatacacatggattgaaaactatgacacagcccatttaacaagtaagaaagttaataagtttgagattatggatcaagttgatgatgatagacttgcacaacttattcctgatttttatgtctttccagaaaaaagtgtaagctataatatactaaagcaaggtaagcatgcttttattttgagcattggtaacagagcaataatgcattgtgcaaggtaaactaaaatagataacaaaaagatggaacctcgttaatcataaaacaataaaattaaatattctcgcagtatatggcagtctaaagcatcaaagatttgatcaacatctttcattttagacatctccttgcaatgtaaaatatcatgtatcaacaacatctggtgcaaatccaactgtcgaactcgacattcatcttagctcgattattattccttcgtacagtgcttgtaaacaatacagaaagaggattattaagaaccagtttactcagactatcaatagaggaaaggactaacgtttctttaaaagaattgatttcatcatctgttaaactaaactcatcattgacagatcgactgatataactgtttttaactttactctttacgttgactttattgacagaattaacattcacatatctactatttaatgtccaacttgttgtttgcgtgagaacattctcagcattaaggaatttttttaacggaatccttggtttctttttgctgtcgctatttacaatatcatgcatatagaccatttcatgaatctggctaaattcaatgtccattgtatacctcacatttttaccgtgactcgatgttactgttcaataatcaccttccatcaatactaaaattaatacccctaatgtgccgataacaaatatagtcattctacgtaacgtctccataaggtgatatttgacattatcagaagctgcgaattcggattttgctctaatcaaatgagagaaatgtaaaatgaagccacgaaatattaataatagcctaccactgcaaccattagttcctgatcaggagaacaaaaataagaaaaatgaagagaaatccgttaatccagttaaaatcacaatggggtctggtttaaattatattgaacaagaatctcttggaggaaaatatctaacacatgatttgagtataaagatagcggatatttctgaagagataattcagcaagcaatattatctgctatgagcatatataaatttagcataacagatgatttaatgagtatggctgtaaatgaactcataaaactgaccaaaatagagaataatgtagacctgaataaattcactactatatgcacagacgttctatccccccgcgtcaccagacataataaagaaaaaaacaaacgacattctacccttctcaaaaatcccctttttaattttcattgaaaaaatggcaattgatactatgaatccaggtcatacacattaaggcatttatgtaatgtcgtaattaagataactaataaggtgaatattagtaaaacaactaatgatgttattagtttgtagtgaacagtacttttaccaataatgaaaaatataccataagcaatgcaagcttaaaactcataatttaaaaaagataaatataaaaatatcaatgagtcaatcaataataatttggcatcacgagacacatcacagaggaatattatgagcacagaaacaattgaaatattcaataatagtgatgaatgggcaaatcaactaaaacacgcattaagcaaaggagaaaatctggcattactacatggtttaactcctgatatccttgatagaatatatgcatatgcattcgactaccatgaaaagggtaatataacggacgcagaaatttattataaattcttgtgcatttatgcgttcgaaaatcatgagtatctaaaagattttgcaagtgtatgtcagcccaaaaagaaatatcaacaagcatatgacctttacaaactaagttacaattacttcccgtatgatgactatagtgttatttatcgtatgggtcaatgtcagattggggctaaaaatatcgataacgcaatgcaatgtttctatcacattattaacaattgtgaggatgatagtgttaagagtaaagcgcaggcatatattgaactcttaaacgataatagtgaagataatggctaagcattacaatcatttggttaaatttgctggttatagtgcagttaaccactataaccagcacctcttatgttttcttaaatcagcatcttaaaacagttaagagcatactataaatcattatttttcaatgcgttagagaacaatctactttatcaaaattgaataaggctatttcagattacatcactgaattcctaagataaattagtgaacacaaccatagatatgtcaaatgtaatttcctgtagcgttaatgacacataaatatgaatagccataatttctattgcttaagcaggatgcaagaaaccaattttttcatagaggttaactaatggacttagaaaataaattcagttatcattttcttgagggattaacgctcacggaagatggaattcttactcaaggaaatgagcaagtttatattccacagaaagagttaggtgtattaatagtattacttgaatccgctggtcatgttgtactgaaagatatgatcatcgaaagtgtatggaaaaatattattgttagtgacgagtccctgacaagatgtatctattctttgcgctgcatttttgaaaaaattggctatgatcgttgcatagaaacaatctaccggaaaggttatcgtttcagcgggcaggttttcaaaactaaaattaatgaagataatactagtgactattccatagctatattccctttcactactagtttgaatacactggatccattaatacttaatcaggaattagtgcaaatcattagtaataaaaaaatcgatggtctctatacctatccgatggctgcgacaaatttttgtaatgatcacatatctcaaaatagtttcttgagcagattcaagccagattatttcgttacaggaagaataaaccagaataatgcagtgaacactttatacattgagttgatcgacgctaaaaaccttttcctcatcgccagtaatcatctccctgttgatgaactacataatacaagtcaatttattatagataatatccttcaaacggtacataaaccagaacgatctgtaagattagctaagcaggaccaaggatataagaatcattatttaagtgatgaaatgttagccggaaagaaagaactttacgacttcacccctgaaagcatttacagggccatgactatatttgatagattacaaaataaaagtgatatacagacgctaaaaacagaatgttattgccttctagcggaatgccatatgtctttggcacttcatggaaaaagtgaacttgaacttgctgctcaaaaagcattagagcttttagattatgtaagtgacataaccactgtcgatggaaaaattttagctattatgggactgataactggtctgtctggacaagcaaaagtatctcatatcttatttgaacaggctaagatacacagtactgatatagcctctctctactactatagggcactagtccactttcataatgaaaaaattgaagaggcaaggatttgtatagacaaaagtctacaactcgaacccagaagacgaaaagcagttgtgataaaagaatgtgtagatatgtatgtgcctaacccgctcaaaaacaacattaaactctactataaagaaactgagagtgaaagccatcgagttataattgacaacattttgaaattaaagcagctgacgagaatttgtatgcgataaatttttattgacgcaattttattatttagatgtatgcaacttgttatttaaacaacagagataaaaatatctaagatattcaccttattgcaagatatttaaaatgctctagagttaaaagtatgatgtaaagaccattggcctggacaattaaaaaagggagctttatgactaatccaatcggtatcaataatttatctcaaagtagtaatatagcgaatgcaacgggtgatgaagtcgtaagtttagataaacacatcaacaccagtgctactgatacagatcaaatacaagcatttatagttagtacatggatggcgccttttcaaaatgatatgtatagtgaagataatcctatcagtccttactataaaattgagtggtaaacgattgaccaaataaatcataacgagatacttttataatagtatctcgttcctttcattcaatcctcacacatgaaaaaatatgcgctcaccaaaagttaaattcttaaccatcttcacgttttgtatatttattacaaaaatgtctttcgccagcaactcttgctctaatgaagcaggaacaatgttcagaatcgaaccaaatttaattaaagctatcgctcttgttgaaagcaatctaaaaaaggatagcataggcaagaacagagataagaataacaatataaagagtttagattattggttaatgcagataaaccagatgcatattcccctgttaaaaaaacgtggaataataaaagatgaacgagatttgttagataacccttgtctgaacattaaaataggaaccgagattttatataaccattttagtcgttgtggagtaacgtggcaatgcctggggacttataatgcgggttttgcaatggataaccaaaaaaagagacagcaatatgccccaaaatatatattgtatataccaggcttaatgaactaaacaatcgtaaggcttcagcaaaatgagcctaaagcctcttttttttatatagtgcaaacacccatacgtaaagctgttttgatcaactcgataccactgtgaacatctaatttcttcatgatattgagtctatgagtttcgactgttttcctgcttaactgcaagaaattagcgatttctttgtttgttttaccatcagctatgagttgtaatatttcactctcacgatttgtaagttgattatcagaggaatacctggaagatattttttcacaatccatatgtacactatcaaaataagtgtaaccattactaatgctatcaatagcacgatttagtttcgccgggtgactggttttccatacgcatcctttcgcacctgcttcaagcaattttatactatcaatatacggcatctttgctacaaatgtaataatatgagcatctatcttatggcttttaacccattttacgagttcggcccccatcattccacctgcaaattctcctaaaataaatatttaggctgtagatttgttacactccgctatagctttcttcagatctttatagcccacttatttaacaacttgaaaataaggtgttttacctgggttgttacaaaaggattgcattgcgtaaacgctttttatttacaacaaaatggggaagtattacggcgaagataaattggagcgggcgaagggaatcgaaccctcgtatagagcttgggaagctctcgttctaccattgaactacgcccgcttcgagatgcgtaaggcattataaaccttacgctctccttagcaagtgccacgctgctgactgctgattaattcgccatcagcattttggcttgctgccctgaggcggcaagtaacgtagcggatcaattgccgttgcacggtaacgaatctggaaatgcaggcgaacagatgccgcatccgtgctccccatagtggcgattttttgcccagccttcacgctttgcccattatttaccagcatcgtgtcattatgggcgtaagccgtaatgtaatcttcactgtgtttaatcatgatgagattaccgtagccacgcagctggttgcccacatacaccacctttcctgcacccgcggcgtaaataggtgtaccccgtggagcactgatatcaatccctttattgccgccatctgctgtgctatacggcatgataactttccctgtcgttggccataaccaacaacgttgccctactggcggccaggaacttttcggtaccgcactactcggtgtaacgcttgcggttttggtcgtacttttggcggtacttttacgtgtaatactgctacttttcgccccacccagttttagtttctgaccaacttcaatggtgtaagggggggaaatgccgttcagtcgcgccagttcttttacgctggttcccgtggtgcggctaatacgatatagcgtatccccccgtttcacggtgtaaacggagccggaatacgttcctgtatcggaacttttgctaccgctacagcccgccaaaagcagtccaacgcttaacaacatcacgatacccagagattttttattcaggcgtcccgcactcaaaatctttcctcgcttaaaaaacaagacgccttatcatagcagccagcctcttgatacccaatctcttgcttctggaaaaacgtggtaatagagaaagaggttaatttcatttggcaaagggaagtatcatcagcaaaatattcgctgtagaggtatcgaacttcctgactttttaccctatttcccatcctgatgcgtaataatcccaatttatcacattgattttatcgccactcatattgatacgtatcactgcccctattcagagtcctgtttcgtatcatatctgtgtttttttaacgtcatcacacttcctacctcccctaacgcttatcgtcgtttctggcgtaaatcttgcctgcttagactaaatctttgccataagaaccaaatgttcaaatcgaggggatttctatggaagcgcgggaagcaaccgctacgggtgaatcatgcatgcgcgtcgatgccattgctaaggtcaccgggcgggcacgatatactgacgattatgttatggcgggcatgtgttatgcgaaatatgtacgtagccctatcgcacatggttatgccgtaagtattaatgatgaacaagccagaagtttgccgggcgtactggcgatttttacctgggaagatgtgcctgatattccattcgctacagctgggcatgcctggacacttgacgaaaacaagcgcgataccgccgatcgcgcactgctaactcgccatgttcgtcatcatggtgacgccgttgccatcgtcgtggcccgcgatgaactcacggcagaaaaagcggcgcaattggtcagcattgagtggcaagaattacccgttatcaccacgccagaagcggcgctggcagaagacgctgcaccaatccataacggtggcaatttactgaaacaaagcacgatgagcacgggtaatgtccaacaaacaatcgatgccgccgactaccaggtacaggggcactatcagacccccgttattcaacattgtcacatggaaagcgtaacaagcctggcgtggatggaggatgacagccgaattaccatcgtttccagcacccagatcccgcacattgttcgccgcgtggttggtcaggcgctggatattccctggagttgcgtacgagtcatcaaaccatttgtcggtggcggttttggtaataaacaggatgtactggaagagccaatggcggcattcctgaccagcaagcttggcggcattccggtgaaagtttcccttagccgtgaagagtgtttcctcgcaacccgtacccgccacgcttttaccattgacgggcaaatgggcgtgaaccgcgacggaacattgaaaggttatagtctggatgttctgtctaacaccggcgcttatgcatctcacgggcactccatcgcttctgcgggggggaataaagtcgcttacctttatcctcgttgtgcctacgcttacagtagtaagacctgctataccaacctccccagcgctggtgcgatgcgtggttatggcgcgccacaagtcgtatttgccgttgagtctatgcttgatgacgccgcgacagcgttaggtattgatcctgttgaaattcgtttacgcaacgccgcccgcgaaggagatgctaatccgctcacgggcaaacgtatttacagcgcagggttgccggagtgtcttgaaaaaggccggaaaatctttgaatgggaaaaacgccgtgcagaatgccagaaccagcaaggcaatttgcgccgcggcgttggcgtcgcctgttttagctacacctctaacacctggcctgtcggcgtagaaatagcaggcgcgcgccttctgatgaatcaggatggaaccatcaacgtgcaaagcggcgcgacggaaatcggtcagggtgccgacaccgtcttcagccaaatggtggcagaaaccgtgggggttccggtcagcgacgttcgcgttattagtactcaagataccgacgttacgccgttcgatcccggcgcatttgccagtcgccagagctatgttgccgcgcctgcgctgcgcagtgcggcactattattaaaagagaaaatcatcgctcacgccgcagtcatgctacatcagagtgcgatgaatctgaccctgataaaaggccatatcgtgctggttgaacgaccggaagagccgttaatgagcttaaaagatttggcgatggacgctttctaccaccctgaacgcggcgggcagctctctgctgaaagctccatcaaaaccaccactaacccaccggcgtttggctgtacctttgttgatctgacggtcgatattgcgctgtgcaaagtcaccatcaaccgcatcctcaacgttcatgatagtgggcatattcttaatccactgctggcagaaggtcaggtacacggcggaatgggaatgggcattggctgggcgctatttgaagagatgatcatcgatgctaaaagcggcgtggtccgtaaccccaatctgctggattacaaaatgccgaccatgccggatctgccacaactggaaagcgcgttcgtcgaaatcaatgagccgcaatccgcatacggacataagagtctgggtgagccaccaataattcctgttgccgctgctattcgtaacgcggtgaagatggctaccggtgttgcaatcaatacactgccgctgacgccaaaacggttatatgaagagttccatctggcaggattgatttgaggataacatcatgtttgattttgcttcttaccatcgcgcagcaacccttgccgatgccatcaacctgctggctgacaacccgcaggccaaactgctcgccggtggcactgacgtactgattcagctccaccatcacaatgaccgttatcgccatattgttgatattcataatctggcggagctgcggggaattacgctggcggaagatggcagcctacgtatcggctctgcaacgacatttacccagctaatagaagatcctataactcaacgtcatctcccggcgttatgtgctgcggccacgtccattgctggaccgcagatccgtaacgtcgctacctacggtggaaatatttgcaacggtgccaccagcgcagattctgccacgccaacgctaatttatgacgcgaaactggagatccactccccgcgcggtgttcgtttcgtcccgattaatggctttcacaccgggccgggcaaagtgtctcttgagcatgacgaaatcctcgtcgcctttcattttccgccacagccgaaagaacacgcgggcagcgcgcattttaaatatgccatgcgcgacgcaatggatattagtacgattggctgcgccgcacattgccgactggataacggcaatttcagcgaattacgcctggcatttggtgttgccgcgccaacgccgattcgctgccaacatgccgaacagactgcacaaaatgcgccattaaacctgcaaacgctggaagctatcagcgaatctgtcctgcaagatgtcgccccgcgttctagttggcgggccagtaaagagtttcgtctgcatctcatccagacgatgaccaaaaaagtgattagcgaagccgtcgccgcggcggggggaaaattgcaatgaatcacagcgaaacaattaccatcgaatgcaccattaacgggatgccttttcagcttcacgccgcaccaggcacgccgctcagcgaattactccgcgaacaaggactgctaagtgtcaaacaagggtgctgcgtgggtgaatgtggtgcctgtacggtgttggtcgacggcacagcaatagacagttgcttataccttgccgcctgggctgaaggaaaagagatccgcacgctggaaggtgaagcgaaaggcggaaaactttctcatgttcagcaggcttatgcgaaatccggcgcagtgcagtgcgggttttgtacgcctggcctgattatggctaccacggcaatgctggcgaaaccacgcgagaagccattaaccattacggaaattcgtcgcggactggcgggaaatctttgtcgctgcacggggtatcagatgattgtaaatacagttctggattgcgagaaaacgaagtaaaaggatatccggcctgaattcaggccggattcactgaggttatgtgtttaacaactcatatttcttaatcttgcgatagagcgtagcaatgccgatgcccagttcatcagcaacttgcttcttgctgttatgacgactaagcgcctcgcggatcatttgcttttccatctcctccagcgccgtgccgcccgcatcatcgagactcaggtgcgcctcactgacctctgttacatcactttgctccgttgtgccattattcagcagatttggcggcaatagcgtgctgtcgataacttcaccactaggaaccacgttaaccagatattccatcaaattgcttaactcgcgcaggtttccgggccaacgatgcttacgcaatatttcgacgacatcgggagcaatgccaggataaacgcttcccagacgacgggtatgcagatgtaaaaagtaatgcaccaatagttcaatatcttcctgacgttcacgcagcggtggcagagttatcgggataacattaagtcggtagaagagatcttcgcggaatttaccttcggcaatgaactgggccaaattctgattagttgcagaaatgatgcgaatgtcgacttgtattgggctactggcaccaatcggcagaatttcacgtgcctcaatagcgcgcagtaatttagcctgcaacattaatggcatatcacctatttcatcgagaaacagcgtgcccgtattcgccgcctgaatcaaccctgttttaccgttggcagaagcgccagtaaatgcacctttaacataaccgaacagttcgctctccagaagctgctccggaatcgcggcacagttgatagcaataaagggtttattccgtcttccgctcaacttatggattgcacgggcgacgacttctttacccgtgccgctttcaccaaccaccataacgctggatgggctgggtgcaatacggctaatgagtcgttttaattgccgcataacacggcactcgccaaccaattgttcaatatgcggttcatcaggtgcatttgctacagaaaaactggtatggctttggtgaaacgccattaaaaataattgtcggccctgaatgttatgcaattgaccaatgattaattcacttttatcgtcccaactaacaatatgctgcatatgtccatgggtaaaattactctcaaatgttaatggtctgaaacggataggtttcccaataatattattttgcacaacaccaagtgtttttaaggcagtctgattaacaaactgaacccgattttcatcatctacaactaatacgccctgatccatattatcgatcatggtcgcaaatattttactgatgttatctcctggcccctgatcctccagaagtttgctaacaaaaatggtggatatatggcgaacataatcagaaaattcgcgtaaattatcactgatatgctcttgttgctcgtgggtaacggcaatcaaacttatcaccccaacacaacgatcctgtaaaatgacaggcgtacccagaaatgctttttcgcggcaattttctttactatcgcaaccttcgcaaaggggatcgaagcgagactgtgtcacaactttttcagttttcgtttccaggacgtggcggagcaggcgactgttgccgctcaactggcgaccaagaaacttcccatacgcgcccgttccggcaacgcgacacaagttttcatcaacgatctcaacctcaagctgcaaaaacgctggcaagcattctggcaaaacgctgaattgtcggttgaatttgcatcaatacactctgcgtagtagcaagctccatagctttaccttccagacttacttaaaagtcgatcattgaagacgttgatggttcacagatcatgatgatattaactcaggcgaaattggctttgataaaaacataagatttttatcattttctaatgaaattatggaagagatatcacatttctatatcaatatgagaattacggcggtgagtttatcaaactgaagagagatagcctgcccctttatcttatttctgatacttagcagcaaataaataacgcgataaaaaaagccaaacgttttcgtattttacaaacaaccagaagctggcatcaatttgtgatcaaccccacacattatccgtcaaattagtcttttgcagccgcgcggataattctggcacacttattgttagtcccaggtatagctgtgaaaacaccaatcactttggcaagtcacagtgaaataaaccactttgcctgtcattccactaccgggactttatgatgaaaactgttaatgagctgattaaggatatcaatagcctgacctctcaccttcacgagaaagattttttgttaacgtgggaacagacgccagatgaactgaaacaagtactggacgttgccgcagcattaaaagcactgcgtgctgaaaacatcagtaccaaagtctttaatagtggattaggtatttccgtattccgcgacaactccacccgtacccgcttctcttatgcttccgcgcttaacctgctcggccttgcacaacaagatctcgacgaaggcaaaagtcaaatcgctcacggcgaaaccgtgcgtgaaaccgccaatatgatctccttctgcgccgacgctattggtattcgcgacgatatgtatctgggcgcaggcaacgcctatatgcgtgaagttggcgctgcacttgatgacggttacaagcagggtgtactgccacagcgtccggctttagtgaacctgcaatgcgatattgaccacccgactcagagtatggctgacctcgcgtggttacgtgaacactttggtagtctggaaaacctgaaaggtaaaaaaatcgccatgacctgggcctactctccaagctatggcaaaccgctctctgtaccacaaggcatcatcggtctgatgactcgcttcggtatggatgtcaccctggcccatccggaaggctacgacctgatcccggatgtggttgaagtggcgaaaaacaatgctaaagcctccggtggtagcttccgtcaggtcaccagcatggaagaagccttcaaagacgcagacatcgtttatccgaagagttgggcaccttacaaagtgatggaagagcgtactgaattgctgcgtgcgaacgatcacgaaggcttaaaagcactggaaaaacagtgtctggcacagaacgcgcaacacaaagactggcattgtactgaagagatgatggaactgacccgtgatggcgaagccctgtacatgcactgcctgccagctgatatcagcggcgtatcctgtaaagaaggtgaagtgactgaaggcgtattcgaaaaataccgtatcgctacctacaaagaagccagctggaagccttatatcatcgccgcgatgatcctgtcccgtaaatacgccaaaccaggtgcactgctcgagcaactgctgaaagaagcgcaagaacgcgtgaaataacccctcgggccgatcagctggtcggccctctatttccagaggccaaaaggataggatatgtccgttttcagtttgaagattgatatcgccgataacaaatttttcaacggcgaaacaagtccgctctttagccaaagccaggccaaactggcgcgccagttccaccagaaaatagctggttatcgcccaacaccgctttgtgcgctggacgatctcgcaaacctttttggtgtgaagaaaattctcgtcaaagacgaaagtaaacgattcggtctgaacgccttcaaaatgcttggcggtgcgtacgccatcgctcaattattgtgtgaaaaatatcatcttgatatcgaaacgctgagttttgagcacctgaaaaatgccatcggcgaaaaaatgactttcgcgaccaccaccgacggcaaccacgggcgcggtgtggcgtgggcagcacagcaactcggacagaatgcggtgatttacatgccgaaaggttctgctcaggaacgcgttgacgccattctgaacctcggtgccgagtgcatcgtcacggatatgaactatgacgataccgttcgcctgaccatgcaacacgcgcagcagcacggctgggaagtggtacaggacacggcatgggaaggttacaccaaaatcccaacctggatcatgcaaggctacgcaaccctggcagatgaagccgtcgagcaaatgcgtgaaatgggcgtaaccccgacgcacgttctgctgcaagccggtgtcggagcaatggccggtggtgtgctgggttatctggtcgacgtctatagcccgcaaaatctgcacagcattattgttgaacctgacaaagctgactgtatttatcgctccggcgtcaaaggcgacatcgtcaacgttggcggtgatatggccaccatcatggcaggcctggcctgtggcgaacctaacccgctgggctgggaaatcctacgtaactgcgccacccaattcatctcctgccaggacagcgttgccgcattaggtatgcgcgtgctgggtaatccgtacggcaacgacccgcgcatcatctccggtgaatccggcgctgtcggtttgggcgttctcgcagcggttcattatcacccgcaacgtcaaagcctgatggaaaaactggcgctgaacaaagatgccgtggtgctggttatcagcactgaaggcgacaccgacgtgaagcactaccgcgaagttgtctgggaaggcaaacacgctgtagcaccttaatcaccctattggaactgctccctgcaaaacggggagtaaaaaatctggagaaaaataatggctaagaatattccattcaaactgattcttgaaaaagcaaaagattaccaggcggatatgactcgcttcctgcgcgacatggttgctattcccagtgaaagctgcgacgagaaacgcgtagtacatcgtattaaagaagagatggaaaaagtcggcttcgataaagttgaaatcgacccgatgggcaacgttctcggttatatcggccacggcccgcgtctggtggcaatggacgctcatatcgataccgtcggcattggcaacatcaaaaactgggacttcgatccgtacgaaggcatggaaactgatgaactgattggtggtcgcggtacttccgaccaggaaggtggcatggcctctatggtttatgccggtaaaatcattaaagacctcggtctggaagatgaatataccctgctggttaccggtacggtgcaggaagaagactgcgacggtctgtgctggcagtacattattgaacaatccggcattcgcccggaatttgtggtcagtaccgaaccaaccgactgccaggtataccgtggtcagcgcggtcgtatggaaattcgtattgatgttcagggtgttagctgccacggttctgcaccagaacgcggtgataacgccattttcaaaatgggtccgattcttggcgaattacaagaactctcccaacgtctgggttatgacgaattcctcggcaaaggcaccctcaccgtttctgaaatcttcttcacatccccaagccgttgcgctgtagcagacagctgcgcagttagtatcgaccgtcgtctgacctggggcgaaacctgggaaggcgcgctggacgaaatccgcgccctgcctgcagtacagaaagctaacgcggttgtttctatgtacaactacgaccgtccgtcctggactggcctggtttacccaaccgaatgctacttcccgacctggaaagtggaagaagatcacttcaccgttaaagcactggtgaatgcctacgaagggctgtttggcaaagcgccggttgttgataagtggaccttcagtactaacggcgtatctatcatgggccgtcacggcattccggtgatcggctttggcccgggtaaagaacctgaagcgcatgcacctaacgaaaaaacctggaaatctcacctggtgacctgtgccgcgatgtacgctgcaatcccgttaagctggctggcaacagagtaattactcttcacttattcccctccggttcgccggagggtttttggagtttgctatgcgcgtattgatcaaaaacggcactgtcgttaacgcagatggacaagccaaacaggatttgctgattgaaagcgggattgttcgccagttgggcaacaatattagcccgcagctcccgtatgaagaaattgatgccactggctgttacgttttccctggcggcgtggatgtccatacgcatttcaatattgatgtcggcatcgcgcgcagttgtgatgatttttttaccggtacccgcgcagctgcgtgtggcggtacaacaaccattattgaccatatgggatttggcccaaacggctgtcggttacgccatcaactggaggtttatcgtggttatgccgcccataaagcggtcatcgattacagctttcacggtgtgatccagcacattaatcacgcaatcctcgacgaaatcccgatgatagtcgaggaaggactgagcagttttaaactctatttaacctatcaatacaaactcaacgatgacgaggttttgcaggcattacgccgcttgcatgaatccggcgcgctgaccaccgtgcacccggaaaatgatgcggctatcgccagcaagcgggcggaatttatcgccgcagggttaaccgcgccgcgctatcatgccttgagtcgccctctggaatgcgaagcggaagccatcgcccgcatgattaacctggcacaaattgccggtaacgccccgctctatatcgtgcacctgtctaacggcttaggtctggattatctgcgtcttgcccgtgcgaatcaccagccagtctgggttgaaacctgcccacaatatctcctgttggacgaacgcagttacgatacagaagatggcatgaagttcattcttagcccaccgctgcgtaacgtacgcgagcaggacaaactgtggtgtggcatcagcgatggtgcgattgacgtggtggcaaccgatcactgcaccttcagcatggctcaacgcctgcaaatttctaaaggcgatttcagtcgctgcccaaatggcttacccggtgtggaaaaccgcatgcagttactgttttccagtggcgtgatgacgggacgtataacaccggaacgctttgttgaattaaccagcgcaatgcccgccaggttgtttggcctgtggccgcaaaaaggattattagcgcccggttccgacggcgacgtggtgattatcgacccacgtcagagccaacaaattcagcatcgccatctccacgacaacgccgactacagcccatgggagggttttacctgtcagggcgcgattgtcagaaccttatcccgtggtgaaacgattttctgtgacggcacctttacaggcaaagccgggcgaggtcgtttcctgcgacgcaaaccgtttgtccctcccgtgctctaaccactgccagggatctatacacaatcaagaatgatgagtgaggaaaaatgagtaagaaaattgttctcgccctgggcgggaatgcgctgggcgatgacctggccgggcaaatgaaagcggtaaaaattacttctcaggcaattgttgatttaattgcccagggacatgaagttatcgtcactcatggtaacgggccgcaggtgggcatgattaaccaggcctttgaagctgccgcaaaaactgaagcgcacagcccaatgctgccgatgtctgtctgtgttgcattaagccagggttatattggttacgatctacaaaacgctttaagagaagaactgctttctcggggcattaataaacctgtagcaacgctggttactcaggtcgaagtcgacgctaacgatccggcattcctcaacccgaccaagccgatcggtagcttctttaccgagcaagaagcagagcaactgacaaaacagggttacactctgaaagaagatgctggtcgcggctatcgccgtgttgttgccagcccaaaaccggttgatatcattgaaaaagaaacggttaaagctctggtagatgcaggtcaggtggtgatcaccgttggcggtggtggtatccctgttattcgtgaaggtaaccatctgcgtggtgccagcgcggttatcgataaagactgggccagcgcccgtttagcagaaatgattgatgccgatatgctgatcattctgactgcggtagaaaaagtggccattaacttcggtaaagagaatgaacagtggctcgatcgcctgagtttaagtgatgctgaacgctttatcgaagaaggtcattttgcgaaaggttctatgctgcctaaagtggaagctgccgccagctttgctcgctctcgcgcaggtcgtgaagcactgattaccgtattgagcaaagcgaaagaagggattgaaggcaaaacaggaacggtgatttgtcagtaatttaaaggccgggtgggtaataccatccggccaaagattgtcaagtaagtgcgctttgttgatgccggatgcggcgcgagcgccttatccgtcctacaaaacatcgcaaattcaatagattgcaatgcacttgtaggcctgataagcgtagcgcatcaggcaatttggcgtttgtcatcagtctcaggccgggtgggtaataccatccggccattttcatttaagccacttccagcacttcttttgtcgctttcacgccctgatgcatcaacatcattaacgcctcaagtacgccgccgccaatcgcccgggctttatcagaaacgctggtgaaatcagcggtttcaccacgaggatcgatatcaccaattttaaaaccaccaaccactgccaggccgtcgttcaacaagccacgcaccatccccgtcaacggtgctttaatttcatgctcaccaatccaggcaatcacatcgccctctttcaccagatcgcctaatttcacgttggatcgcataatgcctgcagcaggagcacggatcacccgtcgggtggtatgccccataatattgccaggaacaccggtattctcctgcgcacaaccagagtaaatcacctgaccgagccagtgcccgcgatttgtttcaattaccgcatgacaatccttcccagcagtaaagcccggcccaagcgcgattgttactggtgccatatctgcccgcgttcccaaattctgtttcgccagaatagcgtccaccacgcaaagcggtttcagttcatcaagcaaactacaggcgggatctaccatcacaggaatgaatccgcgttcggtaagtttcatcgcttccgcagagctggttgccaggcgagcagtgacgccttcgaccgtcatttcgccatcgaacacggcctgggcaaacgccacggtacaacgaatcactgtcggtttttccacttccagcatgatcactttaaaacccgcatgatacagacgtagcgccacaccactggcgatatctcccgcaccgcgaatcaccaccagctggtgtccggaaggatgagaaggtttcatcatcagcccacccggcgcgttatttttcacctgtaatatttctgccagcacgctgatggcgatctcctgcggcgtttccgcacctatgttgtaaccaacgggcgcatgtaaacgggcaatatgttcttcagccacgcctttctcacgcaattgacgcaggaaaagctgaaccttgcgacgacttgccagcaaccccaaccatgcaatgggctgttcaatgagtttgtcgagggcttcacgatcctgattattcgtggcaatcaggacaaaattatcagggcgaatatccagtgcttccactgccgcaccaaagctctcagcatggagaagcgtggtacttggtgggaatagttcaggattgaggctttcgcgataaatatcagcaacggcaatatcaaatcctaatagcgccgcactctgggctatcgcccggttgacatgccccgcgccaatcaacaccagacgtggacgcataccatggacgctgataaatacactcattgcacctccacaatcactcccgacagcatccgcaccgttacgagccatacgtccatggaataatcgcggcttacgttcctgcaatgcctgaaggctctcttcaatcaccttccgctcaaccattccgccaccaattgtaccgacgatagaaccatcggcgcgcactaacatttgtgcagaatggcggggagtgctgcctcggctatcaacaatttgcgccatagcaaacggacaattttgctcttcgagttttgcagcctctgtgaaaatattcataccaacctcaatggatatcctttcagtaacccggaatacccgggccgttaattcacaaatctgcgcgcgattgcaggatgttcttgtatatcgcccagccagattgcctctacgtcgtgttgttgcagcggttgaaggagctcgctttgtgcaatcgcattctcacattgagaaaaacggttaatgaaccagactcgccgacaaccttgcggtacgtttttaaacgccccctgagggtggcgaaccagcgcaacgagatcgctcagttgcaaggttgcatcaggtgttaacccggtaatatcagcaaactggctccagcgatggacattttctgtgctcactttcgcgcccaaagtatgtcctcccatcacagcaatcacgcagcaactgcttttgggtatgcaaggttcgtgctcatcaggcgcttttaacggcattccacggctgccatctgcttcaatgagaattacgtcacactctggtcgttgcaccagtgcatcaatcgcttctggcgtaaatccctgcacttttccctggttcgctttccagctgtgaaaacaaaaactaatgggggatgtaagagacgcatgaggaagcatggcgggatcacgacagaaaaccacgggccagtgagacgttggcataaacatatgtgtcgtcgtcgtgattaacacacgcctgccgctagcctggagcagttctgccagccaaaaaagcaagctggttttccccccagcaccaacaacagaaatcacagtgggacgtttctgcgcacctaaatcaatgactaatgcgcttgggtcaactatacttttcacgagtctttatgacctctctgggataaattatccccaacttaatccatcaggaagtaacgcaattatcaggcgttattagcccctataaataatggaaccactatgagtgccatcgactgtataattaccgctgccggattaagtagtagaatggggcaatggaaaatgatgttaccctgggaacagggaacaattcttgatacaagtatcaaaaatgcgttgcagttttgtagccgaattattttagtcaccggctatcgtggtaatgaactgcacgaacgttatgcgaaccagagcaatatcactattattcacaacccagattatgcgcagggtttactaacatccgtcaaggccgcagtacccgcagtgcaaacagaacattgttttctcacccacggtgacatgccaaccctcaccatcgatatttttagaaaaatctggagcttacgaaatgatggcgcaatactgccactccataatggcatccccggccatccgattttagtgagtaaaccatgcctgatgcaggcaatccaacgacccaatgtcaccaatatgcgtcaggcactccttatgggagatcattattccgtcgaaatagaaaatgcagaaataattttagatattgatactccggacgactttattacagcgaaggaaaggtatactgaaatttaaaaaacgtagttaaacgattgcgttcaaatatttaatccttccggcactcattatcataatgataaggaatcactgattttgagaaaagagaaaaattgataaatgggctggcaataataattttcaggagtgattttaattctcatttagcacctgtgagttcattcacaaaaagcccttaagtttcgagccgcctcacatttttttatatttcccgccaaacctggcaagagtggtgcgattgttgctctatccccctaaaccaccggatttctcaacaccggtcactcaatgatatctgtataagctaaggagagggttatgggggatattatgcgtcccattccgtttgaggaacttttgacgcgcatatttgatgaataccaacaacaacgcagtatctttggtattcccgagcaacagttttacagtcctgtaaaaggtaaaactgttagcgtcttcggtgaaacctgtgccactcccgtcggccctgccgctggcccgcacacgcagctcgcgcaaaatattgtcacttcctggctgactggcggacgcttcatcgaactaaaaaccgtccaaattcttgaccgcctggagctggaaaagccctgtatcgatgccgaagacgagtgctttaacaccgaatggtctaccgagtttaccctgcttaaagcctgggatgaatacctcaaagcctggtttgccctgcaccttctcgaagcgatgttccagccttctgattccggtaaaagcttcatctttaatatgagcgtcggttacaacctcgaaggtattaagcaaccgccgatgcaacagttcatcgacaatatgatggacgcatctgaccatccgaaattcgctcaatatcgcgatacgctgaataaattactccaggatgacgcatttttagctcgccacggattgcaggaaaaacgcgaaagcttgcaagccttacccgctcgcatccccaccagtatggtgcatggcgtcaccctctccaccatgcacggctgtcctccgcatgaaatcgaagccatttgccgctacatgctggaagaaaaagggctcaacacctttgtgaaacttaacccgaccttactggggtacgcgcgtgttcgtgagatcctcgatgtctgcggtttcggttacataggcttaaaagaagagagttttgatcacgacctcaagctgacgcaagcactggaaatgctggaacgcctgatggcactggcaaaagaaaaaagtctcggctttggcgtaaaactgactaacactctcggcaccatcaacaataaaggcgcactgcctggtgaagagatgtatatgagtggccgtgcgctgttcccgctctccatcaatgttgcagcagttctctctcgcgcctttgacggcaaactgcccatttcttattccggtggtgccagtcagctgactatccgcgatatttttgatacaggtattcgccctattactatggcaaccgacctgctgaaacctggcggctatctgcgcttaagtgcctgcatgcgcgagctggaaggctccgacgcctggggacttgaccatgttgacgtcgaacgactgaacagactggcagcagatgcgttaaccatggaatacacccagaaacactggaagccagaagagcgtattgaagtggcagaagacctgccgctgaccgactgctacgttgccccctgtgttactgcctgcgctatcaagcaagatattccggaatacatccgtctgcttggcgaacaccgctatgccgacgcgctggaactcatctaccaacgcaacgctctgcccgccattaccggtcatatttgcgatcaccagtgccaatacaactgtacccgcctggattacgacagtgcgctgaatatccgcgaactgaaaaaagtcgcgctggaaaaaggttgggatgaatataagcaacgctggcacaaaccagccggttctggtagtcgccatccggttgccgtgattggtgcaggtccggcgggtctggcagcaggttacttccttgccagagcgggccatccggttacgctgtttgaacgcgaagccaatgcgggcggcgtggtgaaaaatatcattcctcagttccgtattcctgcagagttaattcagcacgatatcgattttgttgccgctcacggcgtgaaatttgagtatggctgcagtcccgatttaaccattgagcagttaaaaaatcagggcttccactatgttctgattgccaccggcactgataaaaatagcggtgtgaaactggcgggcgacaaccaaaatgtctggaaaagtctccccttcctgcgtgaatacaacaagggtacagcgctcaagctgggcaaacatgtggtcgttgtcggggcgggtaacaccgcaatggactgcgctcgtgcggcgttacgcgttccaggcgtagaaaaagcaacgatcgtttaccgtcgtagtctacaagagatgcccgcatggcgcgaagagtatgaagaagcgttgcacgacggcgtagagttccgtttcctgaataatccggaacgtttcgatgctgatggcaccttaaccttgcgcgttatgagccttggcgaaccggatgagaaaggtcgtcgtcgtccggttgaaaccaatgaaacagtaacactgcttgtagacagcctgatcaccgccattggtgaacagcaggatactgaagccctgaatgcgatgggcgtgccgctggacaaaaacggctggccagacgtcgaccataatggcgaaactcgtctgactgacgtctttatgatcggcgacgtacagcgcggaccatcctccattgtcgctgctgtcggaaccgcgcgtcgggcgaccgatgccatccttagtcgggaaaatatccgttcccaccagaacgataaatactggaacaacgtcaatccagcggaaatctatcaacgtaaaggcgatatctctatcacgctggtgaacagtgacgatcgtgacgcgtttgtcgcccaggaagccgctcgctgcctcgaatgtaactacgtttgcagcaagtgtgtggatgtctgcccgaaccgcgccaacgtctccattgcggtcccaggcttccagaaccgtttccagacgctgcacctcgacgcttactgtaacgaatgcggcaactgcgctcagttctgtccgtggaacggtaaaccgtacaaagacaaaatcaccgtcttcagcctggcgcaagactttgataacagcagcaacccaggcttccttgtggaagattgccgggtacgagtacgtctgaataaccaaagctgggtgttaaacatcgacagcaaaggtcagtttaacaacgtaccaccggagctgaacgatatgtgccgcatcatcagccatgtccaccagcatcatcattatctgctgggccgcgtggaggtgtaatcatgttgattctgaagaatgtcactgcggtacagctacacccggcaaaagtgcaggaaggcgttgatatcgccatcgaaaacgatgtgattgtcgctatcggcgatgccctgacgcaacgctaccccgacgccagcttcaaagagatgcatggccggattgtgatgccagggattgtctgcagccacaaccatttttacagcgggctttcccgcggaattatggcaaacatcgcccctttgcccggatttcatcagtacgctgaaaaatctctggtggcggctcgatcgcgcccttgatgaagagagcctctattacagcggactgatttgttccctggaagcgattaagagcggatgtacaagcgttatcgatcaccatgcctctccggcgtatatcggcgggagactctccacattgcgcgacgcatttttaaaagttggcctgcgcgcgatgacctgttttgaaactactgaccgtaacaacggcatcaaagagttgcaggaaggtgtagaagaaaacatccgtttcgcccgtttgattgatgaggcgaagaaagcgacaagcgagccgtatctggtggaagcacatatcggtgctcacgcgccgtttaccgtgccggatgccggtctggagatgctgcgtgaagccgtgaaagccacaggccgtggtttgcatattcacgctgcggaagacctttacgacgtttcctacagtcaccactggtacggcaaagacctgctggcacgactggcgcaattcgatctcatcgacagcaaaacgctggtcgctcatgggctgtacttgagcaaagatgacatcaccctactcaatcagcgcgatgcgttcctggtgcataacgcccgtagtaacatgaacaaccatgtcggctacaaccatcaccttagcgacatccgcaatctggcgttgggaacggacggcattggtagcgacatgtttgaagagatgaaatttgccttctttaaacatcgcgatgcgggtggtccgctgtggcctgacagttttgccaaagccctgactaacggtaacgaactgatgagccgcaactttggcgcgaaatttgggcttctggaagccggttacaaagctgatttaaccatttgcgattacaacagcccgacgccgctgctggcagacaatatcgccgggcatatcgctttcggtatgggcagtggcagcgttcacagcgtgatggtcaatggtgtgatggtctatgaagaccgtcagtttaacttcgattgcgattccatttatgcacaagccagaaaagccgctgccagtatgtggcgtcggatggatgcgctggcataaatgacagatgccctcttcccgcagggaagagggttaaataaggaaagaagatgattgaacaatttttcaggcccgactctgtcgaacaggcgctggaactgaagcgccgctaccaggatgaagccgtctggttcgccgggggcagcaaactcaatgctacaccaacccgtaccgataaaaagattgccatttccttacaggatctggaactggactgggttgactgggataacggtgcactgcggattggcgcaatgtctcgcttgcagccactgcgtgatgcgcgatttattcctgcagcgctgcgtgaagccctcggttttgtttacagtcgccatgttcgtaatcagagcaccattggtggtgaaatcgccgcccgccaggaagagagcgtgctgcttcccgtcctgttggcactggatgctgaactggtttttggcaacggcgaaacgctgagtatcgaggactacctggcctgcccatgcgatcgcctgctaaccgaaattatcattaaagatccgtatcgcacctgtgcgacccgcaaaattagccgttctcaggcaggtttaaccgtcgtgacggcagccgttgcaatgacagaccacgacggtatgcgaattgcgctggatggcgtcgccagtaaagcactgcgtctgcatgatgtcgaaaaacaaaatctggaaggcaatgcacttgaacaggctgtcgccaacgccattttcccgcaggaagatttgcggggcagcgtggcctataaacgctatatcacgggagttctggtagccgacctgtatgccgactgccaacaggctggggaggaagccgtatgatcatccactttactttaaatggcgcgcctcaggagctaaccgttaatccaggcgaaaacgtgcaaaagctgttgtttaacatgggaatgcactctgtacgcaacagtgatgatggtttcgggtttgccggttctgacgcaataatctttaacggtaatatcgttaacgcgtccttgcttattgccgcacagttagagaaggcagatattcgtaccgcagaatctctgggcaaatggaacgagttaagtctggttcaacaggcaatggttgatgttggcgtggtgcagtctggttataacgatccagctgcagctctgattatcaccgatcttctcgatcgcatcgccgcacctacccgcgaagagatcgacgacgcgctttctggtttgttcagccgcgatgctggctggcagcaatactatcaggtcattgaactggcggttgcacgtaaaaataatccgcaggccaccattgatatcgctccgactttccgtgacgacctagaagtcattggtaagcattatcctaaaactgatgccgcgaaaatggtgcaggcgaaaccctgctatgttgaagaccgcgtaacggctgacgcctgcgtcattaaaatgttacgtagcccacacgctcacgcactgattactcatctggatgtcagcaaagctgaagccttaccgggcgtcgttcacgttattactcacctgaattgcccggatatctactataccccgggtggtcagagcgcaccggaaccgagtccgcttgaccgccgtatgttcggcaagaaaatgcgtcacgtcggcgatcgtgttgctgcggtcgtcgcagaaagtgaagaaattgcgctcgaagcactgaagctcatcgacgttgaatatgaagtgcttaagccggtaatgagcatcgacgaagcaatggcggaagatgcgcctgtcgtgcacgatgaaccggtggtgtatgttgctggtgcgccagatactctggaagacgataacagccatgcagcccagcgcggcgagcatatgatcatcaacttcccgatcggttctcgccctcgcaaaaatatcgccgccagtattcatggtcatattggcgatatggacaaaggctttgccgatgccgatgtgatcattgagcgaacctataacagtacgcaagcgcagcagtgcccgactgaaacacatatctgctttactcgtatggacggcgatcgtctggttatccacgcctccacccaggtaccatggcacttacgccgccaggtcgcgcgcctcgtgggcatgaaacagcataaagttcatgtcattaaagagcgagttggcggcggttttggttccaaacaggacatcctgctggaagaagtgtgcgcctgggcaacctgcgtgaccgggcgtccggtactgttccgctacacccgtgaagaagagtttattgctaacacctctcgtcacgtcgcgaaagtcaccgtcaaactgggagcgaaaaaagatggtcgcctgacggcagtgaagatggatttccgcgccaacactggcccttacggcaaccacagtctcaccgtaccgtgtaacggaccggcgctgagcctgccgttatatccgtgcgataacgtcgatttccaggtcaccacctactacagcaacatttgcccaaatggtgcttatcagggttatggcgcaccgaaaggtaacttcgctatcaccatggcattagcggaactggctgaacagttacagatcgaccaactggaaattatcgaacgtaaccgggtacacgaagggcaagagctgaaaattctcggtgcaatcggtgaaggtaaagcgccgacctccgttccttccgccgccagctgtgcactggaagagatcctgcgtcagggtcgcgagatgatccaatggagcagtccgaaaccgcaaaatggtgactggcacatcggtcgcggcgtcgccattatcatgcagaaaagcggtatcccggatatcgatcaggctaactgcatgatcaaactggaaagcgacggcacctttatcgttcattctggcggtgcggatattggtactggtctggatactgtagtgacgaaactggcagcagaagtgctgcactgcccaccgcaggacgtgcatgttatctccggtgataccgatcatgcgttgtttgataaaggcgcatatgccagctccggtacttgcttcagcggtaacgcggcgcgtttggcagcggaaaatctacgggagaaaattctgttccacggcgcgcaaatgttgggtgagccagtggcagatgttcaactggcaacgccgggcgtcgtgcgcggcaagaaaggcgaagttagtttcggggatattgcccataaaggcgaaaccggcaccggctttggtagtctggtgggaactggcagttatatcacgcctgatttcgccttcccgtatggcgcaaacttcgctgaagttgccgtcaacacgcgtacgggtgaaatccgcctggataaattctacgccttgctggactgcggtacaccggtcaatccagagttagcgttgggacaaatctacggtgccaccctgcgtgctatcggccacagtatgagcgaagagatcatttatgacgccgaaggtcacccgttaacgcgtgatttacgcagttacggcgcaccgaaaattggtgacattccgcgtgatttccgcgctgtgctggtgccgagcgacgataaagtcggcccgttcggggcgaaaagcatcagcgaaatcggtgtaaatggcgcagctccggcgattgctaccgcaattcacgatgcatgcggcatctggttacgcgaatggcatttcacaccggagaaaatactcactgcgctggaaaaaatataaataataaatggccgcttcggcggcctgtttctctgtttgaacgatgactaaatagtgactgcgaaaatgagataagccgttctcaaggcgtcctgcgccccaaattcgtgggaatttattttactaattcagatgatcaaatttactttaaaaggagtgaagggatgtctgatataaaccatgcaggttctgaccttatatttgaactggaggatcgccctccctttcatcaggctctcgttggtgccattacccatctgttggcaattttcgttccgatggtaacccccgcgttaatcgtgggtgcggccttacagctttccgctgaaacaactgcctatcttgtttctatggcgatgatcgcctctggtattggtacctggttacaagtaaaccgctacggcatcgtcggttctggcctactcagtattcagagtgtcaattttagttttgttacggtcatgattgcgctgggcagcagcatgaaaagcgacggttttcacgaagagttaatcatgagcagccttctcggcgtctccttcgttggcgcatttctggttgtcggatctagttttatcttgccctatttacgtcgggttattacgcctaccgtcagcggtattgtggtactgatgatcggcttaagcctgattaaagtcggcattatcgattttggtggaggatttgcagccaaaagcagcggtacgttcggcaattacgaacatctcggcgttggtttattggttttaattgtggtgatcggctttaactgctgtcgcagtccgttgctacgcatgggagggatcgccattgggctatgtgtcggctatatcgcaagcttatgcctgggcatggtggatttcagcagtatgcgcaatttgccgttaatcaccatcccgcatccgttcaaatacggctttagttttagcttccatcagttcctggtggttggcacgatttatctgcttagcgtgctggaagcagtcggcgatatcaccgccacggcaatggtttcccgccgccccattcagggggaagagtatcagtcccggctgaaaggcggcgtgctggcagatggtctggtttctgttatcgcctccgctgtcggtagtttaccattaaccacgtttgcgcaaaataatggggttattcagatgactggcgtcgctagtcgttatgtcgggcgaaccatcgcggtaatgctggttatcctcggcttatttccgatgattggcggcttcttcacgaccattcccagcgcagttctgggaggcgcaatgacgttgatgttttccatgattgccatcgcagggattcgcatcatcatcaccaacggtttaaagcgccgtgaaacacttattgtcgccacttctttaggtttagggcttggcgtctcctacgatcccgaaatttttaaaatattgccagcctctatttatgtattagttgaaaaccctatttgtgctggcgggttaactgcgattttattaaatattatcctccctggtggctaccgacaggaaaacgttctgcctggtattaccagtgcggaagagatggattaacagtaaaggagtcaatgatgagtggagaacacacgttaaaagcggtacgaggcagttttattgatgtcacccgtacgatcgataacccggaagagattgcctctgcgctgcggtttattgaggatggtttattactcattaaacagggaaaagtggaatggtttggcgaatgggaaaacggaaagcatcaaattcctgacaccattcgcgtgcgcgactatcgcggcaaactgatagtaccgggctttgtcgatacacatatccattatccgcaaagtgaaatggtgggggcctatggtgagcaattgctggagtggttgaataaacacaccttccctactgaacgtcgttatgaggatttagagtacgcccgcgaaatgagcgcgttcttcatcaagcagcttttacgtaacggaaccaccacggcgctggtgtttggcactgttcatccgcaatctgttgatgcgctgtttgaagccgccagtcatatcaatatgcgtatgattgccggtaaggtgatgatggaccgcaacgcaccggattatctgctcgacactgccgaaagcagctatcaccaaagcaaagaactgatcgaacgctggcacaaaaatggtcgtctgctatatgcgattacgccacgcttcgccccgaccagttctcctgaacagatggcgatggcgcaacgcctgaaagaagaatatccggatacgtgggtacatacccatctctgtgaaaacaaagatgaaattgcctgggtgaaaagcctttatcctgaccatgatggttatctggatgtttaccatcagtacggcctgaccggtaaaaactgtgtctttgctcactgcgtccatctcgaagaaaaagagtgggatcgtctcagcgaaaccaaatccagcattgctttctgtccgacctccaacctttacctcggcagcggcttattcaacttgaaaaaagcatggcagaagaaagttaaagtgggcatgggaacggatatcggtgccggaaccactttcaacatgctgcaaacgctgaacgaagcctacaaagtattgcaattacaaggctatcgcctcagcgcatatgaagcgttttacctggccacgctcggcggagcgaaatctctgggccttgacgatttgattggcaactttttacctggcaaagaggctgatttcgtggtgatggaacccaccgccactccgctacagcagctgcgctatgacaactctgtttctttagtcgacaaattgttcgtgatgatgacgttgggcgatgaccgtagcatctaccgcacctacgttgatggtcgtctggtgtacgaacgcaactaataataaaactttaacatcctcgtgaggacatcattatgtctggagacatcctacaaacaccggacgcaccaaagccacagggcgcgctggataattattttaaaattaccgctcgtggcagtaccgttcgtcaggaagtactggctggcttaacgacctttctggccatggtttattccgttatcgtcgttccgggaatgctgggcaaagcaggttttcctcccgcagctgtgtttgttgccacctgtctggtcgcgggcttcggcagcttgctgatgggattatgggctaatttgccaatggcgattggttgcgcgatttccttgacggcgtttaccgcattcagtctggtactcgggcaacaaattagcgttcctgtcgcactgggcgcggtatttctgatgggcgtcatcttcaccgccatttccgtaaccggtgtgcgtacctggatcttacgtaatttgccgatgggtatcgctcacggtacaggtatcggtatcgggctgtttctgctgctgattgctgctaacggtgtgggtatggttatcaaaaacccgattgaaggcttgccagtggcgctcggtgcgtttacctccttcccggtgatgatgagcttgctggggctggcggtcatcttcggcctggagaagtgtcgcgtacccggcgggatcttgttggtgattattgcaattagcatcatcggcttaatctttgacccagcggtgaaataccacggtctggtggcgatgccaagcctgactggcgaagatggtaagtctctgattttcagcctcgatattatgggtgcactccagccaactgtacttccgagtgtactggcattggtgatgaccgcagtgttcgacgctactggcaccatccgtgccgtcgccggtcaggcgaatttgttggataaagacaaccagatcatcaacggcggcaaagccctgaccagtgacagtgtaagtagtatattctccggcctggtgggcgcagcgcccgcagcggtttatatcgaaagtgcggcaggaaccgccgccgggggtaaaacaggtttaaccgcaaccgtagtgggggcgttattcctgttaattctgtttttaagtccgctgagttttttgatccctggttacgccactgcacccgctctgatgtacgtaggtttgctgatgttaagtaacgtcagcaagctggatttcaatgattttattgacgctatggctggcctggtgtgtgccgtgttcatcgttctgacttgtaatatcgttaccggtattatgctgggctttgtgacactggtcgtaggccgcgtctttgcacgcgaatggcaaaagctgaatattggtacggtgatcattactgccgcactggtcgcattttacgcgggtggttgggcaatctaatagattctccgcgcctttcagcgcggagatttctttcagagaggattctcaccgctggcaacaatacgctgctggcggactcgcctgagttctctttcagtaagcaactgcagcgcctgtgttgggcaagattcaacgcaggctggcccctcttcccgctgttcacagagatcgcatttcacaatttgttgtcgggtatcccccggcaagctctgaatggtgatcattccaaacgggcacgcactgacgcaactctgacagccaatacaacgggcagaattggtctgcaccacctgctcgcccatcgtcagcgcccccacggggcaagcgccaacacaaggggcgttttcacactgatggcacatcaccggcgcactgatgctgtccagtcgctgtaccttcagccggggtaaaaagacatcggcattcaactcctgttcactagggtgagcgaccacacaggctacttcacaagtacggcagccaatacagtcagccggattaacgataattaagcttttcatcagcttgccttcgtatcaaacagagttaacatatcgcgcgccgcctgccttcctgcggccattgcagtgacaaccagatccgcgccatgaactgcatcaccaccagcaaagacttttttcagatgcgtctgggtaggtaaatacccgacgtcaccggtttgaatcaggccccatttatcgagtttaattccgctgccctgcaaccacggcatggcatgcgcctggaaaccaaaggccataatcagaacatcggcgggcaattcaaactcactacccgctaccggacgaggacgacggcgaccatccggccccggctcacccatggcggtacgaatcaggcccaccgcagttaaacgcccatcttcgtcacaagcgatatattgcggttgaacattgaactgaaactcgacaccttcctcgcgcgcattaaccacctctttgcggctgcccggcatactgacttcatcacgacgatacgcgcaggtcacgctggcggcattgaggcggatggaagtccgcaaacaatccattgtcgtatcgccaccgcccaataccacgactcgcttaccttccacgtccgtcagcggatactcttcagactccggcaatcccatgagctggcgggtatgggcagtcaggaacggtagagcctgaatgacaccgggcgcatcttcatgcggcagatctgctcgcatcatcccgtaagtccccacgccgatgaaaactgcatcatattcagaagttaaatcgctaaaggtaatatcgcggccaatttcacagttaagatgaaagtcgattcccattgcggtgaatatctctcgccgctggcttaataccgttttatcgagtttgaaaggaggaatgccaaaagtcagcataccgccaatttctggatggcgatcaaagacatcgacctgaactcctgcgcgcgccagaatatcagcacaccctaaccctgcaggcccagcgccaatcaccgccactttttcgctacggggaacaactttgctgacatcgggacgccagcccatcgccagcgcggtatcggtgatgtagcgttccagattaccgatagagactgcgccgctgtgatctttcaaagtacatgcgccttcacaaagacggtcctgtggacataccctgccgcaaatttctggtaaggaactggtctggtggcaaagttctgccgcttcaataatctttccttcctgtaccagacggatgtaatccggaatagcgttatgcagcgggcaatgccagttgcagttagctttttcggcacaataaacacagcggtcactctcataagtcgcttgttgtggatccagcccgcaatatatttcgccaaagtgggttttccgttcactcgcactaattttatctgcgcctttacggctgttaacggggagcaacgctgcactgcgagatggctgagcgtcactactcgcttttcctgctgccgttttgcgctggcgggccacctttatctgctgcaaccctttatcgtccatcagtcgtaacgcctgtgttgggcaaacttcaatacaggcttgcgtgccggaactgcgctggttacaaaggtcgcatttctgcgcaatcgtatcgaccatctcaacgacgccaaaggggcaagcgattgcgcatcttttacaaccaatacatttttgctcgtccagttgtacgctatcggactggaaagtcagagcattaaccggacaagccgtaacgcaaggggcattgttgcagtgatggcaggccaccggattcgcagcctggcctttccctacaacgtggatacgcggtcgaaagtcactgtgactcagcggccagttttcttgattgtgtgccaccgcacaggcaatttcacaagcatgacagcctatacattccgcagcttcagcagcaataaacttattcatttgcatccctttcatttaatgagttatgtcttctcaaatttcgcgatgcaataaacgggcatatattaggtagcatgaccgttttaattataattttgcgactgagttcaaattattgcccctcaatctatgccgctttcattatttcaacattgccgatcaaaagagcgctatccagataaaaacgattaaatgcgagagtgcgacatgccagaatgattaatgaaatatcaatatgagaaaattacagataattccattgtcaggttctcttctcattttcgtggtttaaccacgattatgtgattgcctccgcaattcctgtctctaactccccttcctcgcaaaaactggcactccacgagcatgtgtttagacagtttcattaacgtaaacggttgctttttactctggcgggcgaaaggagaaacactgatgagcgccatagattcccaacttcccagttcttctgggcaagaccgcccaactgatgaggttgaccgcatattaagtccaggaaagctgatcatactcggtctgcaacacgtccttgtcatgtacgcaggtgcagtcgctgttcctcttatgattggtgaccgactgggcctcagtaaagaagctattgcgatgctcattagcagcgatctcttttgctgcgggatcgtcacattattgcaatgtatcggtatcggccgctttatggggatccgcctgccggtgattatgagcgtgacctttgctgctgtaacaccaatgatagccattgggatgaacccggatatcggcctgctggggatatttggtgccactatcgccgcgggttttatcaccacattattagcgccacttatcggtcgcttgatgcctttattcccgccactggttaccggtgtggttattacttctatcgggcttagcatcattcaggtgggtattgactgggccgccggaggtaaagggaatccgcaatatggtaatcccgtttatttaggtatctcctttgccgtcttaatttttatcttgctcattactcgctatgcgaaaggatttatgtccaacgtcgccgtattactggggattgtatttggctttttacttagctggatgatgaatgaagtcaatttatccgggctacatgatgctagttggtttgcgattgttacgccgatgagctttggtatgccgattttcgatcccgtttccattctgaccatgactgccgtgttaatcatcgtgtttatcgagagtatggggatgttcctggcactgggtgaaatagtcggtcgtaaactctctagccacgatattattcgcgggctgcgtgtcgatggcgtagggacaatgataggcggcacgtttaacagcttcccccacacgagtttttctcaaaacgttggcctggttagcgtgacgcgcgttcatagccgctgggtgtgtatttctagcggaattatattaatcctgtttggcatggtgccaaaaatggcggtgctggtagcctccattccgcaatttgtgctgggcggcgctggtctagtgatgttcggcatggtactggcgacagggattcgaattctgagccgctgtaactacaccaccaaccgttacaacctctatattgtggcgatcagtctcggcgttggcatgactccgacgctctctcacgatttcttttctaagttaccggccgtactgcaaccgctgctacatagcggcattatgctcgcaacccttagcgccgttgtgctgaacgtcttctttaatggctatcagcatcatgctgacctggtgaaggaatccgtctctgataaagatttaaaagtcaggacagtacgtatgtggcttctgatgcgcaagctgaagaaaaatgagcatggagaataatatgaattttttaatgcgcgctatattcagtctgttgttgctttttactctctctattcctgtcatttctgactgtgttgcaatggccattgaaagtcgcttcaaatatatgatgctacttttttaaatggtttttacctgtcggcatccgctcaaaacgggcggttgtcgataaacgctcacttggttaatcatttcactcttcaattatctataatgatgagtgatcagaattacatgtgagaaattatgcaaacggaacacgtcattttattgaatgcacagggagttcccacgggtacgctggaaaagtatgccgcacacacggcagacacccgcttacatctcgcgttctccagttggctgtttaatgccaaaggacaattattagttacccgccgcgcactgagcaaaaaagcatggcctggcgtgtggactaacagcgtttgtgggcacccacaactgggagaaagcaacgaagacgcagtgatccgccgttgccgttatgagcttggcgtggaaattacgcctcctgaatctatctatcctgactttcgctaccgcgccaccgatccgagtggcattgtggaaaatgaagtgtgtccggtatttgccgcacgcaccactagtgcgttacagatcaatgatgatgaagtgatggattatcaatggtgtgatttagcagatgtattacacggtattgatgccacgccgtgggcgttcagtccgtggatggtgatgcaggcgacaaatcgcgaagccagaaaacgattatctgcatttacccagcttaaataaaaaaaccccgacatttgccggggttgtgagcataacgtaatgcttattttaccggacgcatcgccgggaacagaataacgtcgcggatggtatggctgttggtgaacagcattaccatacggtcgataccaattcccagacctgctgtcggcggtaagccatgttccagtgcggtgacgtaatcttcatcgtagaacatcgcttcgtcgtcacctgcgtctttcgcggcaacctgatccaggaagcgttgcgcctgatcttccgcgtcattcagctcgctaaagccgttaccgatttcacgaccaccaatgaagaactcaaagcggtctgtgatttccgggttaacgtcgttacgacgcgccagcggagaaacttctgccggatattcagtaatgaaggtcggctgaatcagatgtgcttctgccacttcttcgaagatctcggtaacgatacggcccagaccccagctcttctcaacgtggatgccgatagattcagcaattgctttcgcagagtcgaagttgtccagatccgccatgtcggtttccgggcgatatttcttgatcgcttcacgcatggtcagtttttcgaacggtttaccgaagtccagcgtcacgtcgccgtaggtcacttccgtcttaccgagaatatcctgtgccagagtacggaacaggctttcggtcagctcgatcagatctttgtaatctgcgtaagccatgtagagttccatcatggtgaactctgggttatgacgtacggaaataccttcgttacggaagttacggttgatttcgaatacacgctcgaagccaccaaccaccagacgcttgaggtacagttccggcgcgatacgcaggtacatgtcgagatccagcgcgttatggtgggtgataaacggacgcgcagcggcaccgccagggatcacctgcatcatcggcgtttcaacttccataaagccgcggttcaccatgaactggcgaataccagagaggatctggctgcgcactttaaaggtgttgcgggattcatcgttggagatgagatcgagataacgctgacgatagcgcgcttcctgatcctgcaagccgtggaatttatccggcagcggacgcagtgctttggtcagcagacgcaactcggtgcagtggatagacagttcgccggttttggttttgaacagcttacctttcgcgccgaggatgtcgccgaggtcccattttttgaactgctcgttataaacgccttccgggagatcgtcacgggcaacgtacagctgaatgcgaccgccaacgtcctgcagggtaacgaaagacgctttacccataatacgacgggtcatcatgcggccagcaacggcgacttcgatgttcagcgcttccagttcttcgttctctttgccgtcgaattctgcgtgcaattggtcagaggtatgatcgcgacggaaatcgttcgggaaggcaatcccctgctcgcgcaggttcgccagcttctcacgacgcgttttcagttcattgttaagatcgactaccgcgtcagcgccctgtgcgtgttgttcagacatgttggttcctcataaccctgctttcaaacttgcttcgataaattgatccaggctgccgtccagcacggcctgcgtgttgcgggtttctaccccggtgcgcagatctttaatgcgggagtcatcaaggacataagaacgaatctggctgccccagccgatgtcggatttgttatcttccatcgcctgtttctcggcatttttcttctgcatctccagttcataaagcttcgctttcatctgcttcatggcctgatctttgttcttgtgctgggaacggtcgttctggcactgggtcacgatcccggtcgggatgtgggtaatacgcaccgcagattcggtacggttaacgtgctgaccgcccgcgccggacgtgcgataaacgtcaatgcgcagatccgccgggttgatttcgatatcaatatcatcatcaacttccggataaacaaacgcggagctgaagctcgtgtggcgacgaccgccggagtcaaacgggcttttacgcaccaggcggtgaacgccggtttctgtacgcagccagccgtaagcgtaatcgccggagattttgatcgtcacggatttaatacccgccacttcaccttcgctctcttcgatgatttcagttttgaaaccacggctttctgcccagcgcagatacatacgctcaagcatgctcgcccagtcctgtgcttccgtaccgccagaccccgcctgaatatcgaggtagcagtcggcgctgtcatattcgccagagaacatacggcggaactcaagctgcgccagtttttcttccagggcgtcgagttcagcaacggcttcgttaaaggtttcttcgtcgtcagcttctacagccagttccagcagaccagaaacatcttccagcccctgtttcatttggtcgagggtgtcgacaacggcttcgagggaggaacgctctttacccagcgcctgtgcgcgttcgggttcgttccagacatccggctgttccagctcggcgtttacttcttccagacgctctttcttggcgtcgtagtcaaagataccccctaagaacgtcggagcgttccgtgaggtcctgaatgcgattatttaccggattaatttcaaacatggtctgatttcttttattgagctagtcaaaatgcggtgataagagcgggattgtacccaatccacgctcttttttatagagaagatgacgttaaattggccagatattgtcgatgataatttgcaggctgcggttgccgcgaaactcgttgatatcgagcttataagccagttgcacttcgcgcacgccgttatccggccagagggcggtatcgacattaaaagcaataccatccagcagtggaccgccgccgaccggttcgaccatcaccttcaaatgacgttcgcccaccagccgctgttgcagcagacggaaatgaccgtcaaacagcggctccgggaacatctgcccccacgggccagcatcgcgcagcagctgcgccacttccatggtcatttcggccgggcttaacggaccgtcacttaccacttcgccttgcaataggctagggtccagccactcagtaaccagttcgccaaaccgttgttgaaagagtttgaatttatcctcttccaggctcaaacccgccgccatcgcatgaccgccaaacttcagcatcatgccagggtagagtgtgtctaatcgctccagcgcatcacgcatatgcagcccctgaatggagcgaccggaacctttcagcgtaccgtcacctgctggcgcaaacgcgataaccggacggtgaaaacgctctttgatgcggctagccagaataccgacaacgccctgatgccattcggggtgatacattgccagcccgccgggtagcgtgtcacggctgcgctccagtttctcgcacagggtcagggcttcaatttgcattccttgttcgatctcttttcgcgtctggtttagcgcatcgagttcatttgccagcacgcgcgcttcgccgatgttgtcgcacaacaacagcgccacaccgacggacatatcgtccagtcgtccggcagcattgagacgtggccccagcgcaaaacctaaatcgctggcggcgagtttttgtgcatcacggtttgccacttcaagcagcgctttaatccccggacggcactttccggctcggatgcgactcatcccctgccaggtcagaatgcgattattagcgtccagcggcacgacgtccgccactgtccccagcgcgaccagatccagcagttctgccaggttaggaattgcgatgttacgctcatcaaaccagccctgatcgcgcaaaaaggtgcgcagcgccagcatcagataaaacgccacacccacgcctgccagacttttgctcgggaaattacagtcgcgcaagttagggttaatgatcgcttccgctgcgggtaatgtgtcgcctggcaaatggtgatcggtaacaataaccgggatgcccaagctgcgagcgtgctcaacccccgcatgggaggaaataccgttatccaccgtgacaattaactgcgcgccacgggcatgggcctgatcgaccacttccgggcttaagccgtaaccgtcttcgaaacggtttggtaccaggtagtcgatattgctgcaaccaaggctgcgcatcgccagcacgcttagagccgtgctggtcgcgccgtcggcgtcgaaatcaccgaccacaataatccgcgttccttcgcgaaaagcgttgtaaaggatctcaacggccttttcgacgccgctcagttgctgccagggcagcatacctttaacactgcgttccagttcttgcgcactgcgtactccccggctggcgtataaacggcgcagcaagggaggcaattcagcgggcaagtctgccgtttcatcgacttcacggcgacgaagttgtatctgttgtttcacgcgaattatttaccgctggtcattttttggtgttcgtcgaggaattctttcatctctttcggcggctggtaacccggaacaagtgtgccattgctcagcacaactgccggagtaccgctaacgccaagctggacgccaagtgcgtaatggtcggcaatatccacgtcgcaactggctggtgcgacgcttttacctgccatcacatcatcaaacgctttgtttttatctttcgcacaccagatagctttcatttctttctctgcatcgctgtccagcccctggcgcgggaaagcaagataacgcacggtgatccccagcgcgttgtagtctgccatttgctcatgcagtttgtggcagtaaccacaggtaatatcagtaaacacggtgatgacgtgtttttcctgcggcgctttataaacgatcatctctttttcaagcgcattcaactgctttaacagcatcttattggtgacattgaccggagccgtgccactaacgtcatacattggcccctgaatgatatgtttaccatcatcggtgatgtacaacacgccgctgttagtcagaactgtcttcatgccagctacaggcgcgggctgaatatcgctgcttttgatgcccattttggctaacgtttgttgaattgccgcgtcatcagcctgagcaaagccactaaacgccgctaacaaagtaaacaacataaaacctttcttcataaatcttcccgttcttttcagacatcacgcccgcgggtgatgctgttgatgaagttgccgcagacgctcggtagcgacatgcgtataaatttgcgtggtggagagatcgctgtggcccagtagcatctgcaccacgcgtaaatccgcaccatgatttaataaatgagtggcaaaagcgtgacgcaacacatgcggactcagcttttcgctgtcgatacccgccagcacagcataatgtttaatacggtgccagaaggtctgtcgcgtcatctgctgcgcacgctggctgggaaacaacacgtcaatactcacaccattcagcagccacggacgcccatgttccagataggtttccagccagtaaaccgcctcttcacctaacggcaccagacgctctttgttgcctttaccaatgacccgtaccacgccctgacgcaggctgatatcactcattgtcagtccgaccagttcagagacacgcagcccggtagcatacaacacttcaagcatggctttatcgcgtagctccagtggctgatcgattaatggtgcctgtaataaacgttcgacctgcgcttcgcttaaatcttttggcaaacgctggggcaatttcggactagcgagatgcgcactgggatcgtcttcacgaaacttttcgcgataaagatactggaacaatcggcgcactgcactcagcaaacgcgcactgctggtggctttatacccgccctccagccgttctgccagtaatgcctgcaaatcgtcactttgcgccgtcgccagcgtcaacccgcggtgatgcaaccactccaccatcatactcagatcgcgacggtaagcgttcaacgtattttcagccagatttttttccagccacagagcatcaagaaactgctcgatgcgtgccagatcctgtttcacttgcgccccttatggtcactcatttgatccattatgccttattgtgccgtgactaaagcgattctgatacactagccgcaaaagccacagcagaatcgagaagcttacgttatgaatatgggtcttttttacggttccagcacctgttacaccgaaatggcggcagaaaaaatccgcgatattatcggcccagaactggtgaccttacataacctcaaggacgactccccgaaattaatggagcagtacgatgtgctcattctgggtatcccgacctgggattttggtgaaatccaggaagactgggaagccgtctgggatcagctcgacgacctgaaccttgaaggtaaaattgttgcgctgtatgggcttggcgatcaactgggatacggcgagtggttcctcgatgcgctcggtatgctgcatgacaaactcagcaccaaaggcgtgaagttcgtcggctactggccaacggaaggatatgaatttaccagcccgaaaccggtgattgctgacgggcaactgttcgtgggtctggcgctggatgaaactaaccagtatgaccttagcgacgagcgtattcagagctggtgcgagcaaatcctcaacgaaatggcagagcattacgcctgatctcactgacggcttagcgcatatgctttgccgtcatctttatctttgcgtctcttgttgcaacaaaatccgccgtaaatcccgccattcagcttcgtccatgctgtcggctgccagccataaatgttgccgtttaccgccatcagaacgtaaacgcagcatcatgccgctcttaatcatccacggtgctttgacgatgctccactcctgcccttgccaacgcaaacgcccgtccatcaacaagcgaatttccccctggcgagcattaatacgccgctggctgcgaacgcaatcaaacaccaccaggctaagtaacaccatccataacggggtgtaactgagtggccagggcatgagtaaaataacagcggcaaccagcccatgaatcagcaaggaaagccactgtgcgcgccaggagacgcgcaaatcagattgccacaggaccacgttcccggttccgtgtctggatgagtcggaccatcatttccagttctgcatcggccggtttaccgtgattcatcagccagttaaacaggtccggatcgtcacattccagcagacgaataaagatgcgtttttcgtcatcgcttaagctgtcgtactcatgttcgaaaaacggcatgatactaatatcgagttcgcgcataccacggcggcatgcccaatgaatgcgggctttgttgttaatgtccatcttcttcctgtctcacgaaaatccagtacccggctattgtaacgtgtttttcgccttcttttacgggaatatcagtaaacaccatcgcgatcgcgaaattaattcacaacaattcaatggcttcatttttttggaagtcgcctcgcagaaggcacagatcgcgtagtgaaagcacttgcattgcctcatagctcttttaccattagtcattaatacgccgttaagcaactcaggactctattatggcttttacaccttttcctccccgtcagcctacggcttctgcccgtttaccgctgacgctgatgacgcttgatgactgggcgcttgccaccattactggcgcggacagcgaaaaatatatgcagggtcaggtgacagcagatgtcagccagatggcagaagatcagcacctgctcgccgcccattgcgacgccaaaggtaaaatgtggagcaatttacgtctgttccgcgacggcgatggctttgcatggattgaacggcgcagcgtgcgtgaaccgcagctgactgaactgaaaaaatatgcggtattctctaaagtgaccatcgcgccagacgacgagcgtgtgctgcttggtgttgccggttttcaggcgcgcgccgcgctggcaaatctctttagcgaactgcctagcaaagaaaaacaggtagtcaaagaaggcgcgaccactttgctatggtttgaacacccggcagaacgtttcctgatcgtaaccgatgaagctactgctaatatgctgaccgataaactgcgcggtgaagcggaactgaacaatagccaacagtggctggcattaaacattgaagcgggtttcccggtgattgatgccgccaacagcgggcagtttatcccacaggcgaccaatctccaggcgctgggcggtatcagctttaagaaaggctgttataccggacaagagatggtggcgcgagcaaaattccgtggtgccaataaacgtgcgctctggttgctggcaggtagcgccagccgactgccggaagctggtgaagacttagagctgaaaatgggcgagaactggcgtcgtaccggtacggtactggctgcggtaaaactggaagatggtcaggtcgtggtacaggtcgtcatgaataacgatatggaaccggatagcatcttccgcgtacgcgacgatgcgaatacattgcatatcgagccgctgccgtatagcctcgaagagtaaatctctttatcgcatcaggcatttatcgcctgatgcgacgctggcgcgtcttatcatgtctgggatttgatgcctttatcacaacagggacgaggcccgtagatcggataaggcgttcacgccgaatccggcagttgtgctccgatgcctgatgcgacgctggcgcgtcttatcaggcctacaaaggcatacccattacgcctgcccaatatacaaatagatcgccagaaagtggcacacactaccgccgagcacgaagccgtgccagatggcatggttgtatggaatgcgtttgcagacgtagaaaatcaccccgaggctataaaccacgccgcctaccgccagtaaggtaacgctgcccgccgcgagcttaactgccatttcataaattaccaccaggctcagccagcccatcgccagataggtcaccagagataaaattttgaatcggtgcgcgatggtcagtttaaacagaatacccagcaatgccaggctccagataacaatcatcaacccgcgcgctaacggagaatccagccccaccagcaaaaacggcgtgtaggttccggcaatcaacaggtaaatagcgcaatggtcaaatttcttcagccacatttttgcccgttgatgaggaatggcgtgatagagcgtgctagcgaggaacagcaggatcatactgccgccatagaggctgtagctggttatcgctgtggcgctggcattaagatccaccgcctgaaccagtagcaacaccagcccaacgataccaaacaccaacccaatgccgtgactgacgctgttggctatttcctctgccagactatatccctgcttaatgaggggcttctgaaccataacttactccggagaaacgtacacgcacatgtatacctctccagcgtaactgagaatagttccagtgaacacctgttagctaaaataaattctgatttgagactaatctcctaaaaatcatgaaattaaatgcgaaatttcaactaacaggcgtgagttcaatttaaagacatttaaattcaatcacataaaattgtgtctgaccgggatagatgtcagcaatgacttttttcagttcagtcagggtcatattttcctgctctgcatgtttttcagtcagcgtatccagcgttacggtactggttgcggtgacttcaatcgtgcaaaaataaccgtcatcttcaaaacgtccgacacgaagcacatcacccgttttgaagtggctttcagactcgtcgcggatggtgatggttttacgcccagccagaatgtcatcctggaaacgttgaaaaaaagtgatgtcgtttggctgcatggtactatttcctgtaagaattgactcatctggagcctatgatagtgaaaaaactcaccttaccgaaagatttcttatggggcggcgcagttgccgctcatcaggtcgaaggcggctggaacaaaggcggaaaagggccgagcatttgtgacgttctgaccggtggcgcacacggcgtgccgcgcgaaatcaccaaagaagtcttgccaggaaaatactatccaaaccatgaagccgttgatttttatggtcactataaggaagacatcaagctatttgccgaaatgggcttcaaatgttttcgtacatccattgcctggacgcgcatttttccaaaaggcgatgaagctcagccaaacgaagaagggctgaagttctacgatgatatgttcgatgaactgctgaaatacaacatcgaaccggtgatcaccctctcccactttgaaatgccgctgcatctggtgcagcaatacggtagctggaccaaccgtaaagtggttgatttctttgtacgtttcgcggaagtggtatttgaacgctataagcacaaagtcaaatactggatgaccttcaacgaaattaacaaccagcgtaactggcgtgcaccgctgttcggttactgctgctccggcgtggtgtataccgagcatgaaaacccggaagagacgatgtatcaggtgctgcatcaccagtttgtcgccagcgccctggcggtgaaagctgcgcgtcgcattaacccggagatgaaagtcggctgtatgctggcgatggtgccgctctatccttactcctgtaacccggacgatgtgatgttcgctcaggagagcatgcgcgaacgctacgtctttaccgatgtgcagctacgcggctattacccgtcctatgtgttgaacgagtgggagcgtcgcggatttaacatcaaaatggaagacggcgatctggatgtgctgcgtgaaggcacctgcgattatcttggtttcagctattacatgaccaatgcagtgaaggccgaaggcggcaccggcgatgcgatctctggttttgaaggcagcgtaccaaacccgtatgttaaagcatctgactggggctggcagattgatccagtaggtctgcgctatgcactttgcgaactgtatgagcgttatcagaggccgctgtttattgtcgaaaacggttttggcgcttacgacaaagtggaagaagatggcagcatcaacgacgactaccgcattgactacctgcgcgcccatatcgaagagatgaaaaaagcggtgacttacgatggcgtggatctgatgggctacacaccgtggggctgcatcgactgcgtgagcttcaccaccgggcagtacagcaaacgctacggctttatctatgtgaataaacatgacgacggtactggcgatatgagccgtagtcgtaagaagagctttaactggtacaaagaggtgattgccagcaacggcgagaagctttaagtcgatgaagtaccggatgcaatacttgttgcatccggtcagacaacttccctgttttatttcccgcccgccaaatcgataaaacttcccgtgacgtaagaggctttatcacttagtagccagacaatggcctgcgcgacctcttctgcctgtccaccacgctgcatggggatgttgctcttaacgcgatcgacgcgtccaggctcgccgccgctggcgtgcatttcggtataaataaaccctggccgcacgcagttaacgcggatcccctgcgcggcgacttccaggcttagtccggtggttaacgtatcaatcgcccctttgcttgccgcgtaatcaacatattcccctgggctacccaaccgactggccacgctagagacattgacgatagcgccgccactgccaccatttttaagcgccatgcgttttaccgcctcgcggcagcagagaaaatatcccgtcacgttggtggaaagtactcggttgattcgctctgcggtaaggttttcaacggtgcactgggtaaacaagatcccggcgttattgaccagcgctgctagcggttcatcgtgctgatcgattgctgtaaacatcgcaacgacctggttttcgtcgctgatatccgcctggagcacgaatgctttgccaccggcttgcgttattaagttcatcacttcctgcgccgcgtggaggttttgctgataattaaccgccaccgtatacccttcttgcgccaacagtaatgcagttgcccgcccgatgccgcgactgccaccagtcacaagtgctatagccatttgtttttccgagaaaaattaattcgttgacgtatctttgagattgctaacaaactggctcaatcttcaatgttggcacgcttttccccctcgccctttcagggagagggccggggtgagggtaaatattcgcgccagtgccggcctgttcccctcaccctaaccctctccccaaaggggcgaggggactgtctgagcacttttgtactttgtcatctgactaaaaaggcgccgaagcgcctttagaaaatagtcgaatcagtgaattactggtattcgctaatcggtacgcaggagcagaacaggttacggtcgccgtaaacatcatccagacgtttcactgtcggccagtatttgtctgccacacctgccgggaataccgcaacttcacggctgtacggatgcgcccactcggcgaccagttcgctctgaatgtgcggcgcgttcaccagcgggttatcttccagcggccagacaccggctttcacctggtcaatttctgcgcggatagccagcatcgcgtcgataaagcgatccagttccactttgctttcagattcagtcggttcaaccatcagcgtacccgccaccgggaagctcatcgtcggcgcgtggaaaccgtagtcgatcaggcgcttggcaatatccagctcgctgatgccggtttcttctttcagcgggcgaatatcgagaatacattcgtgcgccacgcgaccgtcgcgaccggtatacagcaccgggaaggcatcctgcaggcggctggcaatatagttggcgttgaggattgccacctggcttgcttttttcagcccttctgcgcccatcatgcggatgtacatccagctgattggcaggatagaggcgctaccgaacggtgccgcagaaaccgcgccctgacgggttaacatgccttcgatttgcaccacgctatgacccggtacaaacggtgccaaatgcgctttcacgccgatcggtcccatacccggaccaccaccgccgtgcggaatgcagaaagttttatgtaggttaaggtgactaacgtccgcaccaataaagcccgggctggtgatgccaacctgggcgttcatgttcgcgccatcaaggtaaacctgaccgccgaactgatgcacgacttcacacacttcacggatcgtttcttcatacacgccgtgggtagaaggataagtcaccatgatacaggagaggttatcgcccgcctgttccgctttcgcgcgcagatcagtcagatcgatgttgccgtttttatcacacgccacaaccaccacctgcattcctgccatatgtgcagaagcggggttagttccgtgcgcagaagccgggatcaggcagatatcgcgatgcccttcgttgcggctttcatgataatgacgaatcgccagcaggcccgcgtattcgccctgtgcgccagagttcggctgcatacaaacggcgtcgtaaccggtcagtttcaccagccagtcagccagctgcgcaatcatctgctgataaccttcggcctgctccggcgggcagaacgggtgcagttcggcaaattccggccaggtgattgggatcatctcggcggcggcgttcagtttcatggtgcaggaacccagcgggatcatcgcctgattcagcgccagatctttacgctccaggctgtgcatatagcgcatcatttcggtttcgctgtggtagcgattaaacaccggatgggtgaggatttcgtcgtcgcgcagcatcgcaggctggatagagcggctgtcgtgagccacgtctttgtccagcgtgtcgatgtccaggccgtggttatcgcccagcagcacgttgaaaagctgcattacgttttcacgcgtggttgtttcatcaagggtgatcccaaccgcgttcagaatatcgctacgcaggttgatttcagccgcttcggcacgcgtcagtacgcccgctttgtcggccacttccacacacaaggtgtcgaaatagtgcgcatggcgcagtttcagacctttttgttgcaggcccgccgccaggatatcggtcagacggtgaatgcggttagcgatacgtttcaggccaaccgggccgtgataaacggcatacaggctggcgatgtttgccagcagtacctgggaagtacaaatgttggagttcgctttctcacggcggatatgttgctcgcgagtctgcatcgccatgcgcagcgcggtattgccagctgcatctttgcttacaccgataatacggcccggcatactgcgtttgtattcatctttcgccgcaaagaatgccgcgtgtgggccaccgtagcccatcggcacgccgaagcgttgcgcgctaccaaaaacaatatccgcgccctgtttacccggcgcagttaacagcaccagcgccataatatcggcggcaacgctgaccacaattttgcgacttttcagttcgctaataagcgcagtgtagtcgtgaatttcaccggtagtgcctacctgctgtaacagcacgccgaagacgtcctgatggtcgagcactttttgcgcgtcatcgacaatcacttcaaaaccaaaggtttcggcacgagtacggaccacatccagcgtttgcggatgcacatcggaagccacgaagaagcggttggcatttttcagtttgctgacgcgtttcgccatcgccattgcttcggcggcagcggtggcctcgtccagaagagaagcagaggccatatccagtccagtcaaatccagcgttacctgctggaagttgagcagtgcttcaaggcggccctgggagacttcaggttgatacggagtgtacgcggtataccagcccggattttccagcatgttacgcaggataaccggcggtagctgcacggcggtgtaacccatgccgatgtaagacgtgaagcgtttattgcgactggcaatagccttgagttctgccagtgcggcgtattcggtcgccggtgcgccaacctgcggtggtgtcgcaagttgaatatctttcggcacaatctggccggtcagcgcgtttaagctttgtgcaccaacggcattcagcatttcttgctgttgcgcggcgtccggtccgatatggcgttcaataaaagcgccgctgttttcaagctggcttaacgtctgtgtcatgagcgatggttcctgaaacgtgcagtgaattgtgaacctctctccttacgaagagagtgagggtgaggcataaattttcctcaccctgatcctctcccgcagaagaggaataaagccgttactcgtcttctaacaatgcttcgtatgcggtcgcatccagcagactttccagttcgctttcatcgctggctttgattttaaagatccagccgcctgcatacggttcgctgttcaccagttccggggaatcgctcagtgcgtcgtttaccgccacgatttcaccgcttactggcgcataaatgtcactcgccgcttttacgctttcggcaaccgcgcagtcatcgcccgcgctaaccgttgcgcccacttccggcaggtcaacaaacaccatatcgcctaacagctcctgagcatgttcggtaataccaacggtgtaagtgccgtcggcttctttacgcagccattcgtgttctttgctgtatttcagttctgctggtacgttgctcatcaatcaatctccaaaaaagtaaatcacgcgacggctttgccgttacgcacaaaaacaggttttgtcactttaaccggcatttcacggttgcgaatttgcacaatcgccgtttcgccaataccttccggcacgcgcgccagcgcaatgctgtaacccagcgtcggggagaaagtaccgctggtgataatgccttcatgctggttgccctgcgcatcggtaaagcgtaccggcagttcattacgcagcacgcctttttcggtcatcaccagaccaaccagtttttctgtaccatgctcacgctgcacttccagggcttcacgaccgataaagtcacgatctgccggttcccaggcgatggtccagcccatgttggcggctaaaggagagatggtttcgtccatctcctgaccataaagattcatgcccgcttccagacgcagcgtgtcacgcgcgcccaagccacatggcttaacacccgcttccaccagcgcacgccagaaatcggccgctttttcattgggcagcgcaatttcatagcccgcttcaccggtataaccagtggtggcaataaacagatcgcccgcctgcacgccaaagaacggtttcatcccttccaccgcctgacgctgggcgtcattaaacagtgtggcagcttttgcctgcgcattcggcccttgcacggcaatcatggaaaggtcatcacgaacggtaatttcgatgccgaaaggttcagcgtgttgggtaatccaggagaggtctttttcgcgggtggcggagttaacaacgaggcggaagaaatcttcagtaaagtagtagacgatgaggtcatctatcacaccgccagaggcattcaacatcccgctgtaaagggctttgccgcttttggtgagcttcgccacatcgttcgccagcagataacgcagaaactcccgggtgcggctgccgcgaagatcgacgatggtcatatgactcacatcaaacattccggcatcggtacgtaccgcatgatgttcgtcgatttggctaccgtaatgcagcggcatcatccagccgtggaaatccaccatgcgagcgccgcaaagcgtgtgttgttcgtacaaaggagtctgttgtgccatcttgtcctcattgaataagcggggctgacaactttttcatggtgaaattatcaccacgaaacccagcatcggagccactcccggtccccaacgcaatcgttctcttttgcctgaacttaccaccgaaacagactgttaaccataaggtaaaattgatcatcacattagcttatggttaaaaaatgcaaaaatcgcgacagaataaaaaaccaaaaaatacaccagtttctatacaaagatgatgtgatgagaaagtcaatttgaataagacaatattaagagctaaaaaaatgtcaaaaaacactaaatcaaaaaataatggcattagaaaatataatgcgaaaacggaggtgaaattagtttatttcaaatgaggaaaatctcccggcgaaaaaaccgggagatgaaagtgtgatgggtatcaaataaacaacagaggagaaatttttaacgcagccattcaggcaaatcgtttaatcccattgcctggcggataagttgcggcttaacgccaggaagcgtgtcggccagtttcaaaccaatatcacgcagcagttttttcgccggattggtaccggaaaacagatcgcggaatccctgcataccagccagcatcaacgccgcactgtgcttgcggctacgctcatagcgacgcagataaatgtactgcccgatgtctttcccctgacgatgcaaccgtttcagttcggcaatcagctctgcagcatccataaagccgagatttaccccctgccccgccagcgggtgaatggtatgtgcggcgtcgcccaccagcgccagacggtggctggcaaactggcgcgcataacgccccgtcagtgggaacacctgacgcgcgctctcaaccttgcataagcccaggcgattatcaaaagcgatatttaacgcgcgattaaattcgtcttcacttgcctgctgcatccgctgcgcttcctctgggctcagactccagacaatgctgcaaagatgcggatcgctaagcggtaaaaaggccagaatgccttcgccatggaaaacctgccgcgccaccgcatcatgcggttcttccgtgcgaatggtcgctaccagcgcgtgatgctgataatcccagaaagtcagcggaatatcggctttgttgcgcaaccaggaattagcgccgtccgcgccaatcaccagacgcgccgttaacatgctgccatctttcagcgtcaggaaggtttcattttctccccaggcgacctgctgtaattctgcgggggctaacagagtgatatcactgctctgatgcgctttgttccacagcgcgtagtgaatcacactattttcaacgatatgcccaagatggctatagcccatgctttgatcgtcaaagctaatgtgaccaaagctgtctttgtcccacacttccataccgtgataacagctggccctacgagagagaatgtcctgccagacgccaagacgggtgagtaatttttcgctggcggcattgatagcgctaacgcgcagttgtggtggtgcattcgccgccagaggttcctgtacgcgctgctccagtacggcaacgcgtaagccgctcccctgtaagccacaggcaaccgccagccccaccatgccgccgccaacaatggctacatcaacactttgcattgtttattccttaaaaccgccttcaacgcgccacccaaccgagggtgcgctgcgccagcacatcgcgtgccggggtgaataattccatcgtcatcagcccgatgttgcgcccgacaaccagcggtgcccaacggttggcaaaaagatgtacaaggctgtccgtgacgccaatggttgcttcgcgatcgctctgtcgacgctgctgataacggcacaatacgccgtaatcccccatgtcttctccgcgctcctgcgcctgagtcagggtttccgcaagactcatcacatctcgcataccgaggttaaacccttgcccggcaatcgggtgcagagtttgcgccgcattgcccaccagcacggtacgatgggtaatagatctggcggcgtgggttaacgccagcggataagcactgcgtttaccagcgtgggtaattttcccaagtcgccagccaaaggcgctctggagttcacggcaaaacttctcgtcactccagctcaacacctcttcgcgccgttccagtggatgacaccagaccaggctacagcgtccgtcagacatcggcaacatcgccagcgggccatgttgcgtaaagcgttcaaaagcgcgcccttcatgcgcaacggaagtagcaacgttggcaatcacggccagttgttcgtaaggctcctgctgccagtcaacgccgcacgcggtggctaacgcactatgggtgccatcagctgctaccagcacgcggcccgtcagcgtctcgccactctccagcgtcacttcaacgtgactctgagtacgggcaacgttagccacgcgatcagggcaatgcagcgttacgccaggtgctttacgcagcaatgcaaacagccgttgcccgacattgtgcaattcgacaacctgtcccagcgccgccagttggtaatcttctgcggcgagggtgacaaatccagcgtgaccacgatcgctgacatgcacggtggtgatggcagttgcgcaatccgccagagattgccagacgccgatgcgcgccagttgctgacaggtacccgccgccagcgctatcgctcgtccatcaaagcccggatgagcatgactctctggcgcagtcgcttcaatcaaatgtaccggcagcgccccgtgacttaaccgggaaatagccagcgccagcgtcgcgcccgccatgccgccaccgacgatgattacgctcattgctttctcgcagcaaccatcaacgcttcgatttcttccggctttttcaccacgctggcggtgaggttttcgttaccggtttcggtaatcacaatgtcgtcttcaatacgaatgccgataccgcgatattgttctggcacttctgcatccggcgcaatatacagccctggctctacggtcagtaccatgcccggttccagaatgcggctgcgatcctgaccataaacacccacgtcatggacatccagtcctaaccagtggctaaggccatgcataaagaaaggacgatgggcgttctgagcgatcagttcatcaacatcacctttcaggatgccgagttttaccaggccgctaaccatgatgcgcaccacttcaccagtgacttccagaatggaagttcccggacgatacaggcgcaggctggtttcgagagactccagcacaatgtcgtagatttcacgctgggcctgggtgaatttgccgttgaccgggaaggtgcgggtaatatcgccagcgtaacctttgtattcacaacccgcgtcaatcaacaccaggtcgccgtcgcgcatttcacactcgttttcggtgtagtgcagaatgcagccgttttcaccgctgccgacaatggtgttataggacggatagcgcgcaccgtggcggttaaattcgtggtgaatttcgccttccagatggtactcgaacattcccggacggcatttttccatcgcccgtgtatgtgccatggcggtgatttctcccgcgcggcggagtacggcaatctcttctgggcttttgaacaggcgcatttcatgaacaacaggacgccagtcgatcatcgttgccggtgcggtgagattttgccggctacctttacgcagtttttccagcgcactgttcacgattacatcagcatatgcatattcgccctgggcatggtaaaccacatccaggccgttaagtagttgataaagttgctgattgatttcgctgaatgccagtgcgcggtcaacgcccagtttctctggcgcggcatcctggcctaagcgacggccaaaccagatctccgccgtcaggtcgcgaacgcggttaaacagaacgctgtggttatgagtgtcatcgcttttaatcagcaccagcaccgcttccggttcgttaaagccggtgaagtaccagaagtcactgttctgacgataggggtattcgctgtcggcgctacgtgttacttctggtgcagcaaaaatcagcgcggcgctgccgggttgcatttgctccaccagggcctgacggcgacgctgaaactcttgccgggatatctcactcataacactctccttacgttttttgtttttagtgtagagtcggtttttgtacttctggcgcggtcggttgcggatgagtaaaggtgtcgtggcataacagcgcggcaacacgaacgtattcgatgatctcttcaaggctcatttcaagctcttcctgatcttcgtcttcgtcgtaacccagttgcgcaatgttacgcagatcgtcgatagcttcaccggtttcgccggtcactttatccagcttcggttgcgtaacgccaagaccaagcaggaagtgattgacccaacctgccaatgcatcagcccgatcgaaaacgctgacatcatcgccatcaggcagataaagctgaaaaaggaagccgtcatcctgcagggcatcgctggtggcagagtgcattttacgcagtgcctgtgccagctcatgaccgaaagccatgccttcgttcgtcaggtcgtgaagtagcggtagccaactgctgtcatcgttaccgccacatatcatcccgctgattaaaccatgcatctcagctggggtcagacccgtcccttgttggttcagatactggttcatttcgttgtaaccaggcatttcgttctgtatagacataagcattcgtcgtcaaagggaggaatattcatgatatgctaccactttgggccctggtggaccagaaaagggcttgtctcttctcatcagggtagctatagtgtcgccccttcgcagaccatgggtctaaagacgaaggcagcgcagtcaatcagcaggaaggtggcatgtctgcacaacccgtcgatatccaaatttttggccgtagtctgcgtgtgaactgcccgcctgaccaaagggatgcgttgaatcaggcagcggacgatctgaaccaacggttgcaagatctgaaagaacgcactagagtcacaaatactgaacagttggtcttcattgccgcattgaatatcagctatgagttagcgcaagaaaaagcaaagactcgtgactacgcggcaagtatggaacagcgtattcggatgctgcagcagaccatagaacaagcgttacttgaacaaggtcgcatcaccgaaaaaactaaccaaaactttgaatgacacttttcggtttactgtggtagagtaaccgtgaagacaaaatttctctgagatgttcgcaagcgggccagtcccctgagccgatatttcataccacaagaatgtggcgctccgcggttggtgagcatgctcggtccgtccgagaagccttaaaactgcgacgacacattcaccttgaaccaagggttcaagggttacagcctgcggcggcatctcggagattcccttcttatctggcaccagccatgacgcaactaccagaactcccactgacattatcccgacaagaaatccgcaaaatgattcggcaacgtcgtcgtgcgttaacgccggaacaacagcaggaaatgggtcaacaagccgctacccggatgatgacttatcccccggtggtgatggcacatacggtcgctgtattcctctcttttgatggcgaactcgacacccagccactcatagaacaactctggcgcgccggtaagcgcgtatatcttccagttttgcatccctttagtgccggtaatttgctgttcctgaattaccatccgcaaagcgaactggtgatgaacaggttgaagatccatgagccaaaattggatgtgcgtgacgtgctacccctttcccgattagacgtgctgatcacaccgctggtcgcctttgatgagtacggtcagcgcctgggaatgggcggtggtttttatgatcggaccttacaaaactggcagcactataaaacgcaaccggtgggttatgcgcatgattgtcagttggtggaaaaactccccgttgaagagtgggatatccctcttcctgcggtggttacaccgagcaaagtctgggagtggtaagggcgatacacccgcatcgccctgattgacatcgttgattctttgacctaatttagtgagtaagggtaagggaggattgctcctcccctgagactgactgttaataagcgctgaaacttatgagtaacagtacaatcagtatgatgacaagtcgcatcataacccttctccttcaagccctcgcttcggtgagggctttaccgttacagccccatgctgccctgccatcgtaaatccccattaaataaacacaacgcattgatctgactttgatttattttctggagcagactcgcaaagtagaatgcgcaacgcggcaacggtgtggagaagggataaaaaaacgggcaagtcagtgacctgcccgttgattttcagagaaggggaattagtacagcagacgggcgcgaatggtacccggaatagctttcattgcctgcagcgctttttcggcaacgtcttcgtcggcttcaatatcaataaccacataacccatctgggcggaagtttgcagatattgcgcggcgatgttgacgccctgctcggcgaagattttgttcagcgcagttagcacgcccggacggttttcgtggatgtgcatcagacgacgcccaccgtgcagtggcaggctgacttccgggaagttcaccgcagagagcgtactgccattgtcagaatacttgatcaatttacccgcaacttccaggccgatattctcctgcgcttcctgagtgctaccgccaatgtgtggcgtcagaaggacgttgtcgaattcacacagcggagaggtaaatggatcgctattggtcgccggttccgtcgggaatacgtcgattgccgcccccgccagatgtttgctcgccagcgcatcacacagcgccggaatatccaccacagtaccgcggctagcattaatcagcaggctgccgggcttcattagactaatttctttcgcgcccatcatatttttggtggacggattctctggtacatgcagactcaccacatcgctcatattcagcaggtcagaaagatgctgtacctgagtggcgttgcccagcggcagtttattttcaatatcataaaagtaaacatacattcccaggctttcagccagaatgcccaattgcgtaccaatatgaccgtagccgatgatacccagctttttgccgcgcgcttcaaaagaacccgccgccagtttgttccacacgccacggtgcgctttagcattggcttccggcacgccgcgcaatagcagcagcagttcgccaatcaccagctccgcaacagagcgcgtattactgaacggtgcgttaaataccgggatcccgcgctttgccgccgcatccagatcaacctggtttgttccgatacagaaacagccaatagcgaccagtttttctgcggcgttgatcacgtcttcagtcagatgggtacgggatcgcaggccgatgaagtgggcatcgcggatggattcttttaattgttcatcatccagcgcgcctttgtgaaattcgatgttggtgtaaccagctgcacgaaggctttccagcgccttttggtgcacgccttctaccagcagaaacttaatcttgtctttctccaggcttacctttgccatttacccaatcctgtcttttgaaatgttgtgtgcggatttgcatccgcctttcaacatatcaaaaaataatattgcggcaatatgaacgtttgcgtcgcgatgttgaggaaatatcacgcaaaggtaattcttggatgaatatgctggtttagaggatttatttagagcaatcgacaattgcctggtaaaagcgtgacacatgtcaccaaatttaatgaagagaatttttttaacgggggaggttcccccgtcagatcatttcacaatggttttgacaccgtcaggtgtgccaatcagcgcaacgtccgcgccacggttagcaaacaagccaacagtcaccacgccaggaatcgcatttatggcgttttccatcgctatcgggtcaaggatttccatgccgtggacgtcgaggatcacgttgccattatcggtcaccacgccctgacggtattccggacgaccgcccagtttcaccagctgacgcgccactgcactacgtgccatcgggataacttctactggcagcgggaatttacccagaatatcaacctgcttggaagcgtctgcaatacagataaatttttctgcaacgctagcaatgattttttcacgggtcagcgccgcgccgccgcctttgatcatttgcatgtggccgttgatttcatctgcgccatcaacgtagatgccaaggctgtcgacttcgttgagatcaaaaacgtgaatgccgaggcttttcagtttttcagtggaagcatcactactggaaacggccccttcaatctggcctttcattgtaccgagcgcgtcaataaagtgtgcggcggtggaacctgtacctacaccaacaatggtgccgggctgaacatactgaagtgccgcccatcctactgcttttttcaattcatcctgcgtcatgatcgtttcgcctgtggtatgaaatttcacacgcattatatacaaaaaaagcgattcagaccccgttggcaagccgcgtggttaactcatccataaaatatcgcgcaatggcaggcatcccctttcgccccgcaaataaagcatacaacggtctgggtatgccgctccacggtgcaaacaggcgcaccagttcaccgttcgcaagcccctgtttacaggcaaattgaggcaataacgccacgccattcaacacaaccagggcgcgaactcgctgagcgaaatgcattagcgcaaatccctgatcttttaagctgcgcttttaaccacggatacaaatgttacccgccgacggcttcggtatatgcaacctgacacaaaattgtgtcatagtgcaggaaaaagcatttaccaggagcagacaacagcaatgaaacgcccggactacagaacattacaggcactggatgcggtgatacgtgaacgaggatttgagcgcgcggcacaaaagctgtgcattacacaaagtgccgtcagtcagcgcattaagcaactggaaaatatgttcgggcagccgctgttggtgcgtaccgtaccgccgcgcccgacggaacaagggcaaaaactgctggcactgctgcgccaggtggagttgctggaagaagagtggctgggcgatgaacaaaccggtagcactccgctgctgcttagtctggcggtcaacgccgacagtctggcgacgtggttgcttcctgcactggctcctgtgttggctgatagccctatccgcctcaacttgcaggtagaagatgaaacccgcactcaggaacgtctgcgccgcggcgaagtggtcggcgcggtgagtattcaacatcaggcgctgccgagttgtcttgtcgataaacttggtgcgctcgactatctgttcgtcagcagtaaaccctttgccgaaaaatatttccctaacggcgtaacgcgtagcgcattactgaaagcgccagtggtcgcgtttgaccatcttgacgatatgcaccaggcctttttgcagcaaaacttcgatctgcctccaggcagcgtgccctgccatatcgttaattctagtgaagcgttcgtacaacttgctcgccagggcaccacctgctgtatgatcccgcacctgcaaatcgagaaagagctggccagcggtgaactgattgacttaacgcctgggctatttcaacgacggatgctctactggcaccgctttgctcctgaaagccgcatgatgcgtaaagtcactgatgcgttactcgattatggtcacaaagtccttcgtcaggattaatccatcaaataatgcctgatagcacatatcaggcgttgtcctcacttctttttgtattccttgaatcacatcacaaaatagacaaatctcaggcggcaaaaaacgacgtctgaatgcattttttttgctggcgacaaacccacgtaaaaagctcaccgtaggcgcaaataccctcattttgattgcgttttacggagcaaataatgtctaacgtgcaggagtggcaacagcttgccaacaaggaattgagccgtcgggagaaaactgtcgacagcctggttcatcaaaccgcggaagggatcgccatcaagccgctgtataccgaagccgatctcgataatctggaggtgacaggtacccttcctggtttgccgccctacgttcgtggcccgcgtgccactatgtataccgcccaaccgtggaccatccgtcagtatgctggttttagtacagcaaaagagtccaacgctttttatcgccgtaacctggccgccgggcaaaaaggtctttccgttgcgtttgaccttgccacccaccgtggctacgactccgataacccgcgcgtggcgggcgacgtcggcaaagcgggcgtcgctatcgacaccgtggaagatatgaaagtcctgttcgaccagatcccgctggataaaatgagcgttagcatgaccatgaatggcgcagtgctaccagtactggcgttttatatcgtcgccgcagaagagcaaggtgttacacctgataaactgaccggcaccattcaaaacgatattctcaaagagtacctctgccgcaacacctatatttacccaccaaaaccgagtatgcgcattatcgccgacatcatcgcctggtgttccggcaacatgccgcgatttaataccatcagtatcagcggttaccacatgggtgaagcgggtgccaactgcgtgcagcaggtagcatttacgctcgctgatgggattgagtacatcaaagcagcaatctctgccggactgaaaattgatgacttcgctcctcgcctgagcttcttcttcggcatcggcatggatctgtttatgaacgtcgccatgttgcgtgcggcacgttatttatggagcgaagcggtcagtggatttggcgcacaggacccgaaaagtctggcgctgcgtacccactgccagaccagtggctggagcctgactgaacaggatccgtataacaacgttatccgcaccaccattgaagcgctggctgcgacgctgggcggtactcagagtctgcataccaacgcctttgacgaagcgcttggtttgcctaccgatttcagtgcacgcattgcccgcaacacccagatcatcatccaggaagaaagtgaactctgccgcaccgtcgatccactggccggatcctattacattgagagcctgaccgatcaaatcgtcaaacaagccagagctattatccaacagatcgacgaagccggtggcatggcgaaagcgatcgaagcaggtctgccaaaacgaatgatcgaagaggccagtgcgcgcgaacagagcctgatcgaccagggcaagcgtgtcatcgttggtgtcaacaagtacaaactggatcacgaagacgaaaccgatgtacttgagatcgacaacgtgatggtgcgtaacgagcaaattgctagcctggaacgcattcgcgccacccgtgatgatgccgccgtaaccgccgcgttgaacgccctgactcacgccgcacagcataacgaaaacctgctggctgccgctgttaatgccgctcgcgttcgcgccaccctgggtgaaatttccgatgcgctggaagtcgctttcgaccgttatctggtgccaagccagtgtgttaccggcgtgattgcgcaaagctatcatcagtctgagaaaagcgcctccgagttcgatgccattgttgcgcaaacggagcagttccttgccgacaatggtcgtcgcccgcgcattctgatcgctaagatgggccaggatggacacgatcgcggcgcgaaagtgatcgccagcgcctattccgatctcggtttcgacgtagatttaagcccgatgttctctacacctgaagagatcgcccgcctggccgtagaaaacgacgttcacgtagtgggcgcatccagtctggctgccggtcataaaacgctgatcccggaactggtcgaagcgctgaaaaaatggggacgcgaagatatctgcgtggtcgcgggtggcgtcattccgccgcaggattacgccttcctgcaagagcgcggcgtggcggcgatttatggtccaggtacacctatgctcgacagtgtgcgcgacgtactgaatctgataagccagcatcatgattaatgaagccacgctggcagaaagtattcgccgcttacgtcagggtgagcgtgccacactcgcccaggccatgacgctggtggaaagccgtcacccgcgtcatcaggcactaagtacgcagctgcttgatgccattatgccgtactgcggtaacaccctgcgactgggcgttaccggcacccccggcgcggggaaaagtacctttcttgaggcctttggcatgttgttgattcgagagggattaaaggtcgcggttattgcggtcgatcccagcagcccggtcactggcggtagcattctcggggataaaacccgcatgaatgacctggcgcgtgccgaagcggcgtttattcgcccggtaccatcctccggtcatctgggcggtgccagtcagcgagcgcgggaattaatgctgttatgcgaagcagcgggttatgacgtagtgattgtcgaaacggttggcgtcgggcagagcgaaacagaagtcgcccgcatggtggactgttttatcagcttgcaaattgccggtggcggcgatgatctgcagggcattaaaaaagggctgatggaagtggctgatctgatcgttatcaacaaagacgatggcgataaccataccaatgtcgccattgcccggcatatgtacgagagtgccctgcatattctgcgacgtaaatacgacgaatggcagccacgggttctgacttgtagcgcactggaaaaacgtggaatcgatgagatctggcacgccatcatcgacttcaaaaccgcgctaactgccagtggtcgtttacaacaagtgcggcaacaacaaagcgtggaatggctgcgtaagcagaccgaagaagaagtactgaatcacctgttcgcgaatgaagatttcgatcgctattaccgccagacgcttttagcggtcaaaaacaatacgctcagtccgcgcaccggcctgcggcagctcagtgaatttatccagacgcaatattttgattaaaggaatttttatgtcttatcagtatgttaacgttgtcactatcaacaaagtggcggtcattgagtttaactatggccgaaaacttaatgccttaagtaaagtctttattgatgatcttatgcaggcgttaagcgatctcaaccggccggaaattcgctgtatcattttgcgcgcaccgagtggatccaaagtcttctccgcaggtcacgatattcacgaactgccgtctggcggtcgcgatccgctctcctatgatgatccattgcgtcaaatcacccgcatgatccaaaaattcccgaaaccgatcattagcatggtggaaggtagtgtttggggtggcgcatttgaaatgatcatgagttccgatctgatcatcgccgccagtaccagtaccttcagtatgacgcctgtaaacctcggcgtcccgtataacctggtcggcattcacaacctgacccgcgacgcgggcttccacattgtcaaagagctgatttttaccgctagcccaatcaccgcccagcgcgcgctggctgtcggcatcctcaaccatgttgtggaagtggaagaactggaagatttcaccttacaaatggcgcaccacatctctgagaaagcgccgttagccattgccgttatcaaagaagagctgcgtgtactgggcgaagcacacaccatgaactccgatgaatttgaacgtattcaggggatgcgccgcgcggtgtatgacagcgaagattaccaggaagggatgaacgctttcctcgaaaaacgtaaacctaatttcgttggtcattaatccctgcgaacgaaggagtaaaaatggaaactcagtggacaaggatgaccgccaatgaagcggcagaaattatccagcataacgacatggtggcatttagcggctttaccccggcgggtagcccgaaagccctacccaccgcgattgcccgcagagctaacgaacagcatgaggccaaaaagccgtatcaaattcgccttctgacgggtgcgagtatcagcgccgccgctgacgatgtactttctgacgccgatgctgtttcctggcgtgcgccatatcaaacaagctccggtttacgtaaaaagatcaatcagggcgcggtgagtttcgttgacctgcatttgagcgaagtggcgcaaatggtcaattacggtttcttcggcgacattgatgttgccgtcattgaagcaagcgcactggcaccggatggtcgagtctggttaaccagcgggatcggtaatgcgccgacctggctgctgcgggcgaagaaagtgatcattgaactcaatcactatcacgatccgcgcgttgcagaactggcggatattgtgattcctggcgcgccaccgcggcgcaatagcgtgagcatcttccatgcaatggatcgcgtcggtacccgctatgtgcaaatcgatccgaaaaagattgtcgccgtcgtggaaaccaacttgcccgacgccggtaatatgctggataagcaaaatcccatgtgccagcagattgccgataacgtggtcacgttcttattgcaggaaatggcgcatgggcgtattccgccggaatttctgccgctgcaaagtggcgtgggcaatatcaataatgcggtaatggcgcgtctgggggaaaacccggtaattcctccgtttatgatgtatagcgaagtgctacaggaaagcgtggtgcatttactggaaaccggcaaaatcagcggggccagcgcctccagcctgacaatcagcgccgattccctgcgcaagatttacgacaatatggattactttgccagccgcattgtgttgcgtccgcaggagatttccaataacccggaaatcatccgtcgtctgggcgtcatcgctctgaacgtcggcctggagtttgatatttacgggcatgccaacagtacacacgtagccggggtcgatctgatgaacggcatcggcggcagcggtgattttgaacgcaacgcgtatctgagcatctttatggccccgagcattgctaaagaaggcaagatcagtaccgtcgtgccaatgtgcagccatgttgatcacagcgaacacagcgtcaaagtgatcatcaccgaacaagggatcgccgatctgcgcggtctttccccgcttcaacgcgcccgcactatcattgataattgtgcacatcctatgtatcgggattatctgcatcgctatctggaaaatgcgcctggcggacatattcaccacgatcttagccacgtcttcgacttacaccgtaatttaattgcaaccggcagcatgctgggttaatgactcgtcccgtcacgatcttcagcaatatgctgaagcatcgtggcggtataacgatgatttctgatactataaagatattcctgcatatacatcggcctgtgcggtgcatcaaaatatttcagcgttgccggattcaccagtcgccaggcaaaatgcgggatcaccgtcagaaaatgtccgcgctccacggcgctgattttggccataaaactgtagggacgataaataatggttggattgatcccacaaggtcgcatattcgcatcaatcattgcttcgaagttggcccggttctgaaagcgcatttgtagccagggcagctcctgaagcagctcttgctcttgtcgctcttcataacggcgagaaacgagaaagcctaatcgcagcggtggtagttcactgatagtcaggttttccagttcctgaactcgtgcagatacatgctgtggggagataataaaatctaactggcggtcaaaaagattatcgataacgccattttcgctgaactcaactggctgggcggtcacgccttcatacttatctccgagactaatcaactgatcgaaaataattgtcggataagtattatctatgccaatcacaatttctcgactacgacgcccactgttatggatttcattatcaatcgcagaaagccgttgataaaccgggaacagtttttgatacagttcctgtccggctttattgaggctgatattattatctttgcgggtaaatagcgtatagccaatttgttcttccagcgcggcaatgcttttaccaaatgggctagccgtcatatggattttttctgccgcccgggcaatattattggtttgcgctaataaaatgaaattgcgcatctttttgctaataaaaatgtccatccccctcccccgcatccttgtccgcttaaccgtttcagtcagcctatccttgatgaaaccgcgagcaaagataggtgattacgtcatggttttacagaaaattacagaaaaaggaggcaatatcgggtaaaggcattagcccgacgaatacgtcgggctacaaatattattgtgctgcaggtgttttagcgggttgttgatccacaggttctaactggaagaccacatcgacctgatcatcaaactgaatagcggcctgctcgtaagtttcctgggcggacaccggcgcggcatcggctttcatcatccgcaccattgggctgggctgatagttggaaacatggtagcgcacgctatataccggccccagtttacgatgaaagccgttcgccagttcctgcgcctgatgaatcgcgttatcaatcgctgccttacgcgctttgtctttataggcatccggctgcgccacgcccaggctcacagaacgaatttcgttaagacccgccttcagcgcgccatccagcaaggaattcagtttgtctaactgacggagcgtgacttccaccgttctcacagcgcggtagcctttaaggatacttttaccatcctgataatcataatctggctgggtgcgtaagttcgcactgctgatatcttttttcgcgatctgattgagttcaaggaaggaaatgtattgtgcgacgcgctcatctgcctgtttcttggcagtagcggcatccttcgcggccacgttaacttcaatcgcaagagtggcaatgtctggcaccgcatccacgcttgccgtaccggaggtgacaatatgcggtccatccggcaattcgttagcctgcgctgccatcccgctaatacccattaatgccgccagggcgataactttgaacttcacgttagtctctccgtgttaattgacttgcccaaaattcaggacctctggaggcaagcttagcgcctctgttttatttttccatcagatagcgcttaactgaacaaggcttgtgcatgagcaataccgtctctcgccagctgcaaggcaataaaccacataacacatcccacaaccagattgataatgcgctgtgcttttgccgtgcgcagacgcggtgccagccaggctgcgagaagagccagaccaaagaaccacaggaaagaggcgctaattgtcccgagtgcaaaccagcgttttggttccacatcaagttgcccgccaaggctgcccagtacaacaaaagtatccaggtaaacatgcggattcagccaggtcactgccaacatggtggcgataattttccatctgccttgcttcatgacttcggcgctggctaactcaatattactgctcattgctgttttaaaagcgccaaaaccataccacagcaagaaggctacgccgccccaggtgaccagcgccagcaaccacgggctctgcatcaataacgcgctgccaccaaaaatcccggcgcaaatcaggaccaaatcgctgatagcacaaagtaaggcaatcataatgtggtactgacgacgtatgccctgattcatcacaaaagcattttgtggaccgagcggtaggatcatagccgccccaagtgcaagaccttgaaagtaataagaaaacacgttggatattccgaattaagtatctgatgcagagactatatcgcgggattgttattagcggaaattgataatattaattggcaatcagaaaaactaataagagagaggccagagagtattatctggcctcagcgttgattacgcagctttgtcttctttcacccgcttaaagttcacatccatttgcgggtacgggaagctgataccggcggcatcaaattcacgtttaatacgctccagcacatcccagtacacgttttgcagatcgccgctgttgctccagacgcggaccacgaaattaatgctgcttgcaccaagttcgttcaggcgcacagtcatttcgcgatctttcaaaatgcgatcttcagactggataatattggtcaggatctgcttaacctgatcgatatcggaatcatacgccacgccaataataaattcgttacggcgaactggctcgcgggagaagttaataatatttccggcaataattttaccgttcggaataacgataattttaccgtctgcagtacgcatggtggtggagaaaatctgcacactcagcacagtaccggctacgccgcccaggtcaacatattctccggcacggaacgggcggaacatgacaagtaacacgccagcggccaggttagacagactcccctgcaaagccagaccaacagctaagcctgcggcaccgagtacagcaatgacactcgcggtttgtacacccacgcgtcccagtgcagcgattagcgtaaaggcgataataccgtaacggactaatgcagaaagaaaatcagcaacagtggcatcgattttacgggagatcatcaggcgattcaccgcgttggaaatcatccgcgcgataatcaaaccaacgatgatgatcgcgagtgccgccacgatgtttactgcataacttagcagcagcgcctggttagctaccagccagcttcccgcgccgtttatgctatcgacaacattcaaatcttccattcaatattccttttcaactgactcaaaatggagaaatacactccgccgccttatgacgggcagtctgacaagggtaaacaataaagcataattttgccaaatagatcacagatttctcatctgaatcaccttgcttttggcgaaaaaatccccgcagagcggggctcagacagatatcaatgtgcgctttgtcatgccggatgcggcgtgaacgccttatccggcctacaaaaacctgcaaattcaatatattgcaggatacgtgtaggcctgataagcgtagcgcatcaggcaattttgcttttggcgaaaaaaagacccgcagagcgggccttgagataagcagaaaggaatatcttacagaacgtcgatcgcgttcagttcctggaatgctttctccagacgagcgatcatgctagtctgaccggcacgcagccatacgcgcggatcgtagtatttcttgttcggctgatcttcgcctttcgggttacccagctgaccctgcagataagcttcgttcgctttgtagtagttcagaacgccttcccaggttgcccattgggtatcggtatcgatgttcatttttactacgccgtagcttacggagtctttgatttcctgagcagtagaaccggaaccaccgtggaatacgaagttcaggctgttgtgcggcaggttgtgtttcttggaaacatattcctgagaatcacgcaggatggtcggagtcagaaccacgttacccggcttgtaaacaccgtgtacgttaccgaaggacgctgcgatggtgaaacgcgggctgattttgctcagttcggtgtatgcgtaatcaacgtcttccggctgggtgtacagtgcagaagcgtccatgtggctgttgtccacgccgtcttcttcaccaccggtgcaacccagttcgatttccagagtcatgccgattttggacatgcgctccaggtatttagagcagatttcgatgttctcttgcagagattcttcagacaggtcgatcatgtgagaagagaacagcggcttaccggtagctgcgaagtgtttttcacccgcgtccaacagaccgtcgatccacggcagcagtttcttcgcgcagtggtcagtgtgcaggataaccggaacaccataatgttcagccatctggtgaacgtgatgcgcaccagagatcgcgcccaggatagcagcaccctgcggaacgtcagatttcacgcctttaccagcgataaaggaagcaccaccgttggagaactgaacgataaccggcgctttaactttagcagcggtttccagtacggcgttgatggagtcagtaccgacgcagtttactgctggcagtgcgaagttgttttcttttgctacctggaaaactttctgtacgtcatcaccagtgattacgccaggttttacgaaatcaaaaatcttagacatgtctcttgtcctgtatcgtcgggccttatactcgtcatacttcaagttgcatgtgctgcgtctgcgttcgctcaccccagtcacttacttatgtaagctcctggggattcactctcttgtcgccttcctgcaactcgaattatttagagtatgaaaaattgcgtgctctaaaagcgcgctgaaacaagggcaggtttccctgccctgtgattttttacttcttagcgcgctcttcgagcatcgctactgcaggcagtactttaccttccacgaattcgaggaatgcgccgccgccagtggagatgtaggagattttgtcagcaatgccgaacaggtcgattgctgccagagtgtcgccgccgccagcgatggagaacgcttcgctgtctgcgatagcgttagccacgatttcagtacctttgcggaagttcgggaattcgaacacgccaaccggaccgttccacagaatggttttcgcattcttcaggatttcagccagttcctgagcggaagcatcaccgatatccaggatctgctcgtcagctttcacatcgttaacagatttcagggtagccggtgcagtttcagagaactcggttgctacgcgaacatcagacggaaccgggatgttgcaggtggtcagcagacgtttagcttcgtcaaccaggtcagcttcgtacagggatttacccacatcgtggccttgtgccgcgataaaggtgttagcgataccaccaccaacaatcagctggtcagcgattttagacagggagtccagaacggtcagtttggtagatactttagaaccaccaacgatagccaccatcgggcgagcaggttctttcagtgctttacccagcgcgtccagttcagctgccagcagcgggcctgcgcacgcaacgtcagcgaatttaccgataccgtgagtagaagcctgcgcgcggtgagcagtaccgaatgcgtccattacgaacacgtcacacagtgcagcgtattttttggacagggtttcgtcgtctttcttctcgcctttgttgaagcgaacgttttccagaacaaccagttcaccttcagcaacgtcaacgccgtcgaggtaatctttaaccagacgaaccgggttagacagtttgtctttcaggtagttaacaaccggcagcagagagaattcttcgttgtactcgccttcggtaggacgacccaggtgggaagttaccatcacttttgcgccttgtttcagggccagttcgatggtcggcagagaagcacggatacgcgcgtcgctggttactttcccgtcttttactggtacgttcagatccgcacggataaatacacgtttcccagcaagatccagatcggtcatcttaattacagacatggtgaatcctctcgttgattctaaaagttttgcagacgctgcttgcgtcttacctgaaagcaacagtagccatagctaacgtcgtgtcgagcattcggttagcaaagccccattcgttatcgcaccagaccaacgttttgatcaggtgtgcgccactgacccgggtttgggtgccatcgacaatggcactgtgcggatcgtggttaaaatctacagagaccaacggcaattccgtatagtcaactataccatgaaatgcaccttgtgctgctttttgcagcaacaggttgacttcattggcttttacaggtttcttcaccgtcacgcttaaatcgattgccgtcacatttatggttggcacacgtaccgcaatcgcttcaaagcgatcgttaaattgcggaaaaaatcgtgtgataccggcggccagtttagtatcgaccggaatgatgctctggctggctgcccgggtgcgacgcaggtcaggatggtatgcatcaataacctgttgatcgtgcatggcggagtgaattgtggtcacagtgccggactcaataccgtacgcatcatctaacaatttgatgacgggaattatgcaattcgtggtacaggaagcgttagaaacgatgcggtgttccgcacgaagttgatcctgattgacgccgtaaacaacggtcgcgtcgagatcgttactgccaggatgactaaagagcacttttttggccccggcggcaatatgcgcttcgccatgctcgcgggagccatatacgccggtgcagtcgaggactacatcaacgccaagttcacgccaggggaggctttgcagactacgttcatgcaatacgcggatggcgtcatcaccaacaaaaagttgatcgcgttcctgtcgtacttcccatgcaaaacggccatggctggtgtcatatttcaacaaatgcgccatgcccgcagcatccgccagttcgttgattgccaccacggtaatttccgcccggcgtccggattcatacaaagcacgaaccacattacgcccgatgcgaccgaagccatttatcgctacgcgtacggtcatagatctcctgcaaggttttccctgagcaaatttgccagacagagtaatccagcaaatcgtccggggaaaccttacctgtcgcaaactgcgactgattggttaattgtcgaacatttaatcgactgaaacgcttcagctaggataagcgaaacgtggaataaaaggaatgtttgtccagccgaagaagacatttatctgactcacatcacacttttatccccttttgtgggaagctttattccaggctggcgtaataataaccctacaataactggaataaattgtcagcttgtgaagtgataccggccttcttcagtcatctctactatcagattggcctgacggctattcatcagcacacgctcgacattggggccatcggtgcgggcataaaatgcttcggctacttgccgcgttaatcctcccgcaattttacgactaatcaagcgctcccgcagaatttgagcaggtgcatgaataaaaatagaaaaatcgcagaaagatgccaactccagccacttttcatcatccagtaacaaccagtttccttcgacgatgacgagtggtgcggtaacgtgcaacgcatcttcaacaggatcatgcttttgtcgatcgtactgcggccacgtacaatccccttccacgacctggcgcagattttccgtcagtttcgcaacgtcaaatgtctctggtgcgcctttgaaggggcgcaattgatgcgcatccagccagctattgtaatggtgaaaaccatccatcgggagcgtctgaatagcgggcagttccgggtcttgttgcgcgagatattcccagaaggtggttagggtacttttacccgtccccggcggagcgcaaagaaaaaccaccgtacgccgctgcggatttaccgtctgtaaggccgccaacatgtgcagcaacggtttatgtacattttcaatctcttcgttctggtactgtgcctgtatcttcagcccattcaccgttaattcaattttcacggcgttaattcctttaaggtggtcgttactgccagcgtcagcgccgttttgaccattccgctaaaacgcgcctcactccagacggagaaatcagcgaacttcatcgcttttaacgcgtcatagagcatcgcattgcgggttatgctattgacgttgctgataaaatcccaggtcatgtcatcggcaaatccgggcgtttcatcctgttcgttcaggtaatgccagaactgggaaaaatgcgtgatatcggcgtacaaccatttatccattttcccaacgcataaatcaaacgcagtgcaacatcaatatcgtcaagcgggccgctttgggcgagtaacggcttcactgcatattccacgatctcttcatcgttatcgacaaacaggctcggcagaaactggcgtatcccctggagcaaaatggtatgcgcagttttcataaaactaaataaattgtcctgtgcatccagttgctcaagcacatcatcttctgtcagcgtcgccattggtcttccgatagatcaccatcaatgcagggagtctattatattacacgtttggtccgcgccgccgatcagtaatgtctgcgtccgcaccccattcgccgtctgttggataccgttcaccagctcaccgcccgtcacgcccgtagcgctaaagaggatatcgttccccctcaccagttcatcgaggctgtacacacggttaacgtcaacgcccattgccttgcaacgcttgcgctcctgctctgcaatctgccgattttccgtgtaatcccctttagcctggcaaaagtcaatcagctcggcctgcatatccccgcctaatgctttaacggcacaggcagaaatcacgccttctggcgcaccgccgatggtgtacatcacatcgtaaggattatcctgccagcaggtcagcacgctggcggcgacatcgccatccggcagggcaaaaaccttcacgcccagctgtgttgcttcctcaatcgcggcactcaggcgcggtttatccagcgtaaccatgcgcagcttatccagcggtttgcctaacgctttcgccacgttgcgcaggttgtccgtcagaggcaaagacagatcaatcgcgcccgccgccagccgattaacaaccagctttttcatatacatatcgggcgcatgtaacaggctatctcgaggggcgaaagccatgaccgccagcgcattgctctgccccatcgccaccatccgcgtgccttcaatgggatcaaccgcgatatcgacttctggcccatcgcctttgcccacctcttcgccaatccacagcatcggcgcatggtcaatttctccttcgccgataaccactcgtccacgaaaagcgacgtcgtttaatgcctggcgcatcgcggtgaccgccaggccatcaattttatttttgtcgccacatccggtttgcggccaggcagccaacgctgcctgttccgtaacgcgaaataatggccacgccagggacatcattgcgcggcctccccgatatcaacgccaaattgtgccagcagatatttctcggcctgttcattccagatgccgtgcgtttcctcaaccagccgcgccaactctttaaacagcggatcggttttgcctttttcggcaaaatcggcaatggcagtgagcggcatggtcacgccgttataaatgagttttttaccgccagggatatccggcagattgagcacggtttctggcaccgcatccaggccaccgatatgggtcaccataaagctcggctgtaactgcccagtggcgctaagggcaatcgcctctttcatgtcgtccgtactaccgccagatgtaccgacgacgtgcgtgctgttgtaatggacgttgtagaaattaaacggcactttgaagtttttatccgtcggcccggcaaagaagttcagacagccatcttccgccagtaattcatcagccatctcaacgacagcaggcaccgccgcataaacaaaaatgtcatcgaacccggcatctcctgtcagcgcccgcagcatctggacaggatcgctcatccctttggtattcacatacaccagctcaatgcctttactggccgccagttccaccggcagcagcttctgtacctgcgccagacgtttgtcgtcgatatcgaccaccaccacccggctcggttgtatgccgccgttaatggcgtaatcgatagcgccaatgcccatcggacctgcacacgccagcagtgcaatattgccgccaggtttgacgcccatgcgatgctcataaacatattgcgtggtgtgataattggcatgataagcaccaataatgcagcacataggctctgccaggctcgccgcagcaaaataagagccgtgatacggtaatacgcagcccaaattaatggcgatttcgggaataatcatataagtggcattgccgccaaaatattcgtagctgtagcccgcactatatccgcttggtaaccccatcgccggttgcaatacaaaacgctggccttttttatatttgccagtgagatttttacccacttcgacaataaccccggcacattcatgcccggtaatgaccggatgattttctaaatcgtcgggtacgcgtttatgttcactaccgagtaacgccgctttccaggtgcttaaacagacgctgtcagaaattacactcaccagtaattcattatcggtaatttctggcagttcaaatacgcgcagacggacatcccgcttgccataaatagcagcaactttggttttcatttttacctctgtaatcagtgtttatgttcggcggttaattgattaaataaagtgtcgagttttggatcgccaatatagttattaatcaatatcagtggtttatccgtcacacgtttcacgcgcccttccagactggcatgagtaacgacgatatccgcatccgcaggcacgttttctatggcgtaatgttttacttcaattgccagccccgctttttccaggcgtttacggaaggtggtcgcgcccatcgcactggagcccatccccgcatcgcaaacaaaggcgatacgcttaaccctgcttaagctgaatgcaccctcttgtttcatcgccttaaccgcattggcactctgagcaaactcatcttcgctctccgtttccaccgttttttccatcttcagtatcaggctagtaatagcaaaggacaccagggtacctaccgtaacaccggcaattgtcgccaggaagctgcctttcggcgtcagtgccaggtaagcaaagatagaccccggacttgggccagccaccagaccaccgtccagtaagttaaacatccaggtgccagacataccgcccgcaatcatggcaataatggtcagcggcttcatcagcacatacgggaaatacagttcgtggatcccaccgaggaagtgaataatcatcgccccgggcgcagaacgtttactcatccctttaccaaacaaggtaaacgccagcagcagccccaggcccggacctgggttagaggccaccataaagaagatggatttaccgttaacgctagcctgttgcattcccagcggataatagacgccctgatcgatcgcattattgaggaaaagcactttcgccggttcattgatgacactcaacaatggcagataacccgcatgtaccagcgcctcaatacactctttgacgaaagtattggcaattaacaccgccgggccgataacttcaaaacccagcagacaaaggagcatccccgcgatacctaaactgaagttattgataaccatctcaaaaccggcaggtatgcgtttttccagtgccttatcgacatattttatgaccaacccaccgagcggccccatgatcatactgccaaggaacatcgggatctctgcgccaacgatcacaccaatagtacctattccgcccatgaccgccccgcgtttaccgccgaccagatgaccacctgtagaaccaatcatcacgggcaataaataggtaatcatcgggccgacaattttggcgaaatgttcgttaggcagccaaccggtgggaataaataacgcagtaataaaaccccaggcaataaaagcaccaatattggggatgaccattgcagtcaaaaagcccccaaaagcctggacctttgcacgagcagacttgttttccataatattatcctgtagaggagagagtaattatccgcggctgataatgtccgctaattgtttttcactacttgctgttaagagttgttcgagtatttcttcttcgcacagtaattcacttaacgcctgaatagcgccaatgtggctatcggcatcggcagcagagagtccgatgagtaatttaattggttcgtcattccccggaaaataaacaccttgttcaagtaatgtcaaagacatcccggttttaagcgccccacattccggtcgcgcatgaggcattgccacgcctggtgcgagaatataataagggccattgttaatggtggaatctttaattgcctgaatgtaattctcgctgatatagtttttatccagcaaacttaccatgctgaaatcgatagcttcctgccaatcttttgcactatgtataacactgatactactttctggaaaataatcactaagccgcataaattatccttattttatttttagggtaccgtccggcggtaaaaataaaatactcgtgcggtttaatgaaagcaattgagcagggaaaccggtgttttgaaaacagtgaattattaatttcttatataacattgagttatagatataacaacaaatgtcaatacgcatatcgtgatgcatattacataattgatatttattgcatataaatatttgtgatctacaacacgccttatctattgcttgtccgcaaacggacatatcaaggtaataaaaaaggtcgccgaagcgacctttttacccgaaatgctaattacagcagttcttttgctttcgcaacaacgttatcaacagtgaagccgaactcttcaaacagcagctctgccggagcagattcaccgaaggtggtcataccgacgatagcaccgttcaggccaacatacttgtaccagtagtcagcaatacccgcttctacagcaacgcgtgcagtaaccgctttcggcagtacggattcacggtaagcagcatcctgcttgtcaaatgcgtcggtagacggcatggacaccacgcgcgctttcacgccttcggcagtcagtttttcgtaggcagcaacagccagttcaacttcactaccggtagcgatgaaaatcagttccggctgaccggcgcagtctttcagcacataaccaccgcgcgcgatgtttgccagttgctcttcagttcgttcctgctgcgccaggttctgacgggagaggatcagtgcggtcgggccgtcctgacgctcaacaccgtatttccacgcgaccgcggattcaacctggtcacacggacgccatgtagacatgttcggggttacgcgcagagaagcgacctgctcaaccggctggtgagtcgggccgtcttcgcccagaccgatggagtcgtgggtgtaaaccatcacctgacgctgtctcatcagcgcagccatacgtacggcgttacgtgcgtattccacgaacatcaggaaggtggaggtgtacggcaggaagccaccgtgcagggagataccgttagcaatcgcggtcataccgaactcgcgaacaccgtagtggatgtagttacccgcagcatcttcgttgattgctttagaaccagaccacagggtcaggttagacggcgccaggtcagcagaaccgccgaggaattccggcaacagcggaccgaacgcttcgatagcattctgagacgctttacggctggcgattttcgccggattagcctgcagtttagcgatgaactctttcgctttagcgtcgaagtcagacggcatttcgcctttcatacggcgggtaaattcagcggcttcctgcggataagctttcgcgtaagcagcgaatttctcgttccatgcggattctttcgcctggcctgcttctttcgcatcccactgagcatagatttcagacgggatttcgaacggcgcatatttccagcccagttgttcgcgggtcagggcaatttcagcgtcgcccagcggcgcaccgtgggagtcgtgggtaccggctttgttcggggaaccgaaaccgatgatggttttgcacatcagcagggaaggtttgtcagtcactgcgcgcgcttcttctactgcgcgtttgatagatgccgcgtcatgaccgtcgatgtcgcgaataacgtgccagccgtaagcttcgaaacgcattgcggtgtcgtcggtgaaccagccttcaacgtgaccatcgatagaaataccgttgtcatcgtagaatgcaatcagtttacccagcttcagcgtacccgccagagagcaaacttcgtgggagatgccttccatcatgcagccgtcgcccatgaaggcgtaggtgtagtggtcgacaatgtcgtggcccggacggttaaactgcgccgccagcgttttttctgcaatcgccataccgactgcgttggcaataccctgacccagcggaccggtggtggtttccacaccagcggtgtaacccacttccgggtgacccggagttttagagtgcagctgacggaagtttttcagttcttccatcggcagatcgtaaccggtgaggtgcagcaggctgtagatcagcatggagccgtggccgttggacagcacgaagcggtcacggtcagcccaggacggattctgcgggttgtgtttcaggaaatcacgccacaggacttcggcaatgtcagccatacccataggggcacccgggtgaccggatttggctttctgtactgcgtccatgctcagcgcacgaatagcattggcaagctctttacgactggacattttgactccagatcggatgatgaagggcacgcccttaacgacttgacgacagcgcgttttgggctacgccggaaaatttgccaacaatttaccacaagccgcgcgtcatgtacatggaacatccttttgccgcttcagaaatctctggatcatgctcgcatgttgcgcaatctactcgcccgtccgctgcgcttttccttatactgagactgagcgtcgattcacctgcaaacggcgcatttttagaataatcctgaccttgtgcggaagagaaaacatgaaaattcgcgccttattggtagcaatgagcgtggcaacggtactgactggttgccagaatatggactccaacggactgctcagtagtggagcggaagcttttcaggcttacagtttgagtgatgcgcaggtgaaaaccctgagcgatcaggcatgtcaggagatggacagcaaggcgacgattgcgccagccaatagcgaatacgctaaacgtctgacaactattgccaatgcgctaggcaacaatatcaacggtcagccggtaaattacaaagtgtatatggcgaaggatgtgaacgcctttgcaatggctaacggctgtatccgcgtctatagcgggctgatggatatgatgacggataacgaagtcgaagcggtgatcggtcacgaaatggggcacgtggcgttaggccatgtgaaaaaaggaatgcaggtggcacttggtacaaatgccgtgcgagtagctgcggcctctgcgggcgggattgtcggaagtttatctcaaagtcaacttggtaatctgggcgagaaattagtcaatagccaattctcccagcgccaggaagcagaagccgatgattattcttacgatcttctgcgccaacgcggcatcagcccggcaggtcttgccaccagctttgaaaaactggcaaaactggaagaaggtcgccaaagcagtatgtttgacgaccatcctgcatccgccgaacgcgcccagcatattcgcgatcgcatgagcgcggatgggattaagtaaagcctggtggtgtcgaacgtaggtcagataaggcgttcacgccgcatctgacatgaatggcacatttgttaccttgtgcgcattgccggatgcgatgctggcgcatcttatccggcctacgggtgccgaacgtaggtcggataaggcgttcacgccgcatccgacattaatggcacgttttacccgtgcgcatcgcatctggtgcttactcgccctttttcgccgcctgaatatacagcatttccagcgccagcgttgccgctgccagagcagtgatttcgctctgatcgtatgccggagccacttccactacgtccatcccaacaatgttgagatctttcaggccgcgtaccagtttaatagcgcgatcggaggtcaggccgccaatcactggcgtaccggtgcctggtgcaaaagcaggatccaggcagtcgatatcaaaagtcaggtaaaccggcatatcacccacaatctgtttcacttgggcgataacgtcatccacgctgcgatcgttcacctggcaggcgtccagcacggtaaagccgttgtctttatcaaactcggtacgaataccaatctgcacggaatgattcgggtcgatcagaccttctttcggcgcggtatagaacatagtgccgtggtcaaattcacaaccgttcgcataggtatcggtgtgggcgtcaaagtgtaccagcgccattttgccgaaatgcttcgcatgagcacgcagcagcggcagcgtaacaaagtggtcaccaccgaaagagagcatacgcttaccggcagccagcagcttctcggcgtgcgcctgcagcttttcgctcatctcacgggcatcgccaaaggcatataccagatcgccgcagtccacgacgttcagacgctcacgcatgtcgaaattccacgggaagcggttgtgttcccaggccagattcgtgctaacctgacggatcgctgccggaccgtggcgaccacccgcacgaccagaagtggccatatcgaacggcacgccagtaatcacccagtctgcatcgctgtcatacggctggaagttcatcggcaggcgtaaaaaaccaaaggcattggaaaccagactgttatcgtattgatgacctaaggtgctcatggatggactcctattacaaagtcgatataaaaaaacccttccgcgtcgttaggcccgacgaggaagggttggatttgtcacaataaattgtggcggattatcaccgctaaattaagcggattcaagtaacacaggacttactcatcttcaagataagtataaccgtacaaacctgcctcgaactcttcaaggaactgttgttgcagttcagcatcaagatcggttttcttcacttgatcgcggaactgggttaacagcgttttcggatcgagctgtacatattgcagcatgtccgccacggtatcgccttcgtcagacagttctacttctacgctaccgtcagggaagacgaacacgtcaaccgcttcggtatcaccgaacaggttgtgcatgttgccgaggatctcctgatatgcgccgaccataaagaaaccgagcatcggcggattctctggatcgtactccggcattggcattgtcgtggcaataccgtcaccatcaatatagtggtcgatagcaccgtcagagtcacaggtaatatccagcagcacagcgcgacgttccggcacttgatccagcccttccagcggcagaaccgggaacaactggtcgatcccccatgcgtccggcatgctctggaacaggctgaagttgacgtacattttgtccgccatacgttcctgcagctcgtcgataatcggacgatgagcacggttttgcggatccagctgcttttgcacttcatggcacatgctcaaataaagctgctcagcccatgcacgttcttgcaggctaaagatgccggaagagtagccgatatgaatgtcgtgcagatccatctgactgtcgtgtaaccattcacgcagagaacggcgagttcccggttcgtgcatctcctgccaggtttcccacatgctttgcagcgcgcgcggcgcatcttctgcaggcgcggtcggcaccgtgtattcgttacgttccacgccgatgatattagacaccagcacggtgtgatgcgcagtcaccgcacgaccgctttcggtgattaccgtcggatgcggcagaccgttttcttcacacgcatcgccaatcgcccagataatgttgttggcgtattcattgaggccgtagttcacgctacagtcggactggctacgagtaccttcataatccacgcccagaccgccgccgacgtcgaagcactgaatattgacgcccagcttgtgcagttccacatagaaacgcgcggattcacgaacgcctgtcgcgatatcgcgaatattcgccatctggctaccgaggtggaagtgcagtagttgcaggctgtcgagacgcccggcttcacgcagggtttcaaccagttgcagtacctgagtcgcagccaggccgaacttgcttttttccccgccggaggactgccatttaccgctaccctggctagccagacgtgcacgcacgcccagacgaggaacgacattcagacgttctgcttcatccagcacaatggcgatttcactcatcttctcaatgaccagatagaccttgtgccccatcttctcgccaattaatgccaggcggatatattcgcggtctttataaccgttgcagacgatgacgctacgggtcatgccagcatgtgccagtactgccatcaactcggctttggaaccggcttccagacccagcggttcgccgctatgaatcagggactcaatcacgcggcggtgctggttaactttgatcggataaacaaggaagtaatcgccgttatagccgtaggattccctcgcacgtttgaacgcggcgttaatggaacgcaaacggtgctgcaggatctgtgggaaacagaacagtgcaggcagacgctggccctgtgcttcacgagttttcactaactgcgcgagatcgacgcgagcttccgggacgtccgggtccgggcacacgctaatgtggcccagctcgttaacgtcatagtagttattgccccaccaggcaatattgtaagtacgcagcatcttgctggcttcctgggagctcattgcaacctcctgcatggagcgtagtacaccgtgttcgcccgcactgctaggcaaacccatagacatgtcgtcagacatagcgaacctcaaattattttattaagtgtaaaacagttaacgactatcgcagcctggaactggcttaacaacccataagcacatggattttccagcagactatgctgacgctccaactgcgcaaccggtttctttttcataacattattaagcacataaccgaacgtaagtgtgaaagttcggcgaaaccacgagaaaactcttgtttttacaagagcgcccttgttcagtcctcagtaactgtaaccagctcttgaatcctgagaagcgccgagatgggtataacaagcgcaggtatgcaaagcagagatgcagagtgcggggaacgaatcttcaccagaacggtgagacaggttaagcagcagacaacggttcattatttcgtaagtcctccacggccgcctgttaagacgaacccacaagccaaaactctgattagtacccggctggaagtggcaacacgaaagaaacgtcgtgtgctttttatttaagccgcgcgccgcgttttataccccacaatggcagaaaattgcaaaagataaatacgcagaatgccggcattgtcaggaaaaatttccagccacgtttttaacagaatgagacagctttcaaaaaaaagtggaaatagggtgaagaattgacctaaaatagccatccagatgttaatccatccataccgattaacactcagactgccagtgtttttaacctgcagagtcgtggtaggatccgctaccacagaaaatccacacaacagtttgagctaaccaaattctctttaggtgatattaaatatggcaaaacacctttttacgtccgagtccgtctctgaagggcatcctgacaaaattgctgaccaaatttctgatgccgttttagacgcgatcctcgaacaggatccgaaagcacgcgttgcttgcgaaacctacgtaaaaaccggcatggttttagttggcggcgaaatcaccaccagcgcctgggtagacatcgaagagatcacccgtaacaccgttcgcgaaattggctatgtgcattccgacatgggctttgacgctaactcctgtgcggttctgagcgctatcggcaaacagtctcctgacatcaaccagggcgttgaccgtgccgatccgctggaacagggcgcgggtgaccagggtctgatgtttggctacgcaactaatgaaaccgacgtgctgatgccagcacctatcacctatgcacaccgtctggtacagcgtcaggctgaagtgcgtaaaaacggcactctgccgtggctgcgcccggacgcgaaaagccaggtgacttttcagtatgacgacggcaaaatcgttggtatcgatgctgtcgtgctttccactcagcactctgaagagatcgaccagaaaagcctgcaagaagcggtaatggaagagatcatcaagccaattctgcccgctgaatggctgacttctgccaccaaattcttcatcaacccgaccggtcgtttcgttatcggtggcccaatgggtgactgcggtctgactggtcgtaaaattatcgttgatacctacggcggcatggcgcgtcacggtggcggtgcattctctggtaaagatccaagtaaagtggaccgttccgcagcctacgcagcacgttatgtcgcgaaaaacatcgttgctgctggcctggccgatcgttgtgaaattcaggtttcctacgcaatcggcgtggctgaaccgacctccatcatggtagaaactttcggtactgagaaagtgccttctgaacaactgaccctgctggtacgtgagttcttcgacctgcgcccatacggtctgattcagatgctggatctgctgcacccgatctacaaagaaaccgcagcatacggtcactttggtcgtgaacatttcccgtgggaaaaaaccgacaaagcgcagctgctgcgcgatgctgccggtctgaagtaatctttcttcacctgcgttcaaaggccagcctcgcgctggcctttttcttttggataggcgttcacgccgcatccggcaaaaaaaccgcccgcacaataacatcattcttcctgatcacgtttcaccgcagattatcatcacaactgaaaccgattacaccaaccacaacagacaaagatttgtaatattttcatattattattcggttttcacagttgttacatttcttttcagtaaagtcttaattgcagataacagcgtttaatctatgatgatataactcaattattttcatgcacttaaatcataactaagataaatgttagtgtaagcgattacactgatgtgatttgcttcacatctttttacgtcgtactcacctatcttaattcacaataaaaaataaccatattggagggcatcatgcctgacgctaaaaaacaggggcggagtaacaaggcaatgacgtttttcgtctgcttccttgccgctctggcgggattactctttggcctggatatcggtgtaattgctggcgcactgccgtttattgcagatgaattccagattactagccacacgcaagaatgggtcgtaagctccatgatgttcggtgcggcagtcggtgcggtgggcagcggctggctctcctttaaactcgggcgcaaaaagagcctgatgatcggcgcaattttgtttgttgccggtagcctgttctctgcggctgcgccaaacgttgaagtactgattctttcccgcgttctactggggctggcggtgggtgtggcctcttataccgcaccgctgtacctctctgaaattgcgccggaaaaaattcgtggcagtatgatcagcatgtatcagttgatgatcactatcgggatcctcggtgcttatctttctgataccgccttcagctacaccggtgcatggcgctggatgctgggtgtgattatcatcccggcaattttgctgctgattggtgtcttcttcctgccagacagcccacgttggtttgccgccaaacgccgttttgttgatgccgaacgcgtgctgctacgcctgcgtgacaccagcgcggaagcgaaacgcgaactggatgaaatccgtgaaagtttgcaggttaaacagagtggctgggcgctgtttaaagagaacagcaacttccgccgcgcggtgttccttggcgtactgttgcaggtaatgcagcaattcaccgggatgaacgtcatcatgtattacgcgccgaaaatcttcgaactggcgggttataccaacactaccgagcaaatgtgggggaccgtgattgtcggcctgaccaacgtacttgccacctttatcgcaatcggccttgttgaccgctggggacgtaaaccaacgctaacgctgggcttcctggtgatggctgctggcatgggcgtactcggtacaatgatgcatatcggtattcactctccgagcgcgcagtatttcgccatcgccatgctgctgatgtttattgtcggttttgccatgagtgccggtccgctgatttgggtactgtgctccgaaattcagccgctgaaaggccgcgattttggcatcacctgctccactgccaccaactggattgccaacatgatcgttggcgcaacgttcctgaccatgctcaacacgctgggtaacgccaacaccttctgggtgtatgcggctctgaacgtactgtttatcctgctgacattgtggctggtaccggaaaccaaacacgttagcctggaacatattgaacgtaatctgatgaaaggtcgtaaactgcgcgaaataggcgctcacgattaatctccccaagcttcctcccatcgcggaggaagccacctcttgcagtcatcttttcttcgctctatcctctgccgctatgaaaacatcccgtctccctatcgccatccaacaggccgttatgcgtcgcctgcgggaaaaactcgcccaggccaacctgaagctagggcgtaactacccggagccaaaactctcttacacccagcgcggaacctccgccggaacggcctggctggaaagctatgaaattcgcctcaatcccgttttgctgttggaaaacagtgaagcttttattgaagaagtggtaccgcacgaactggcacatttgctggtatggaaacatttcggccgcgtagcgccacatggcaaagagtggaagtggatgatggaaaacgtgctgggtgttcccgcccgtcgtacgcatcagttcgaactgcaatccgtgcgtcgcaacaccttcccctaccgctgcaagtgccaggagcatcagcttaccgtacgccgccataatcgcgtagttcgtggcgaggccgtctatcgctgtgttcactgcggtgaacagctggttgcgaaataaccatctgaactatcaggaactttcctgatttggctgattgcataccaaaacagctttcgctacgttgctggctcgttttaacacggagaagtgcctacactagcgggattctttttgttaacccctaccccacgcgtacaaccgcgtggggagacgacgcggatttttaactatgcgtatcccccgcatttatcatcctgaaccactgaccagccattctcacatcgcgctttgcgaagatgccgccaaccatatcgggcgcgtactgcgcatggggccggggcaggcgttgcaattgtttgacggtagcaaccaggtctttgacgccgaaattaccagcgccggcaaaaaaagcgtggaagtgaaggtgctggaaggccagatcgacgatcgcgaatctccgctgcatattcacctcggtcaggtgatgagccgtggtgaaaaaatggaatttactatccagaaaagcatcgaactcggtgtaagcctcattacgccacttttttctgagcgctgcggcgttaaactggatagtgaacgtctgaacaagaagcttcagcagtggcagaagattgcaattgctgcctgtgagcagtgtggtcgtaaccgggtgccggaaatccgtccagcgatggatctggaagcctggtgtgcagagcaggatgaaggactgaaactgaatcttcacccgcgcgccagtaacagcatcaatacgttgccgttaccggttgaacgcgtccgcctgctgattggcccggaaggcggtttaagcgcagatgaaattgccatgactgcccgctatcaatttactgatatcctgttgggacctcgcgttttgcgtacagagacaactgcgctcaccgccattaccgcgctacaagtacgatttggcgatttgggctaacggagaagaataatgatcaagctcggcatcgtgatggaccccatcgcaaacatcaacatcaagaaagattccagttttgctatgttgctggaagcacagcgtcgtggttacgaacttcactatatggagatgggcgatctgtatctgatcaatggtgaagcccgcgcccatacccgcacgctgaacgtgaagcagaactacgaagagtggtttagcttcgtcggtgaacaggatctgccgctggccgatctcgatgtgatcctgatgcgtaaagacccgccgtttgataccgagtttatctacgcgacctatattctggaacgtgccgaagagaaagggacgctgatcgttaacaagccgcagagcctgcgcgactgtaacgagaaactgtttaccgcctggttctctgacttaacgccagaaacgctggttacgcgcaataaagcgcagctaaaagcgttctgggagaaacacagcgacatcattcttaagccgctggacggtatgggcggcgcgagcattttccgcgtgaaagaaggcgatccaaacctcggcgtgattgccgaaaccctgactgagcatggcactcgctactgcatggcgcaaaattacctgccagccattaaagatggcgacaaacgcgtgctggtggtggatggcgagccggtaccgtactgcctggcgcgtattccgcaggggggcgaaacccgtggcaatctggctgccggtggtcgcggtgaacctcgtccgctgacggaaagtgactggaaaatcgcccgtcagatcgggccgacgctgaaagaaaaagggctgatttttgttggtctggatatcatcggcgaccgtctgactgaaattaacgtcaccagcccaacctgtattcgtgagattgaagcagagtttccggtgagcatcaccggaatgttaatggatgccatcgaagcacgtttacagcagcagtaacccaccttagcgagaaggatctcgttgagactctgagtgacagcgcccttctttccacgcatactgggcgctgttgcttttttgaaccaggaaacagaacctctgacaatgaatttacagcatcactttcttattgccatgcctgctctccaggatccgattttccgtcgttccgtggtctacatttgcgaacataataccaatggtgcaatggggatcatcgtcaacaagccgctggaaaatctcaaaattgaagggattctggaaaagctgaagatcacgccggagccgcgtgatgaaagtatccgtctggataaaccggttatgctcggcggtccgctggctgaagatcgcgggtttattttgcatactccgccctccaattttgcttccagcattcgcattagtgacaacacggtaatgaccacttcccgcgatgtgctggaaacgctcggcaccgataaacaaccgtctgacgtattggtggctctgggttatgcctcctgggagaaaggtcaactggaacaagaaattctcgataacgcgtggctaacggccccggcagatctgaatattctgttcaaaacgccgattgccgaccgctggcgcgaggcggcaaaactgattggtgtggatattctcaccatgcctggtgtggcaggacacgcctgatgagtggaaccttactcgccttcgacttcggcaccaaaagcattggcgtagcggtcggccaacgcattaccggcaccgctcgccctttgcctgcaattaaagcacaggacggtacgccggactggaacattatcgagcgtttactgaaagagtggcagccggacgaaatcatcgtcggtttgccgctgaatatggacggcaccgagcaaccattgactgccagagcgcgtaaatttgccaaccgtattcatggccgtttcggtgttgaagtaaagctccatgacgagcgtcttagcactgtggaagcccgttccggtctgtttgaacagggcggctatcgggcgctcaacaaaggcaaagttgactctgcctctgcggttattattctcgaaagctatttcgagcagggatattaaggcgatttaaacgcctggcggagtgtaaataatatcatcgcgtcttattgccggatgcggcgtgaacaccttatccagcacacatctggcagcggctataggtctgataagacgcgttagcgtcgcatcagacatttattgcctttgtaggcccgataagcttgcgcatcgggcatggcaacgtcacaaacgcccttcccccacccggtgctgataactctgctgaaacgttatcatccccacctgctgcccggtttgaataacatgcggtaactggtgggttttcccttcgcgaatcaaattccccaccgcgggtgtgttaatcagcaattcaaatagcgccacgcgtccttcctgtttatccacttccagcttttgactcagcactgcccgtaaactacctgccagttgattacgcacggggtctttttcctgcgccggaaaactatccaccagtcgctcaactgcctgcgcggcaccacgcgtatgtaatgttgccagcaccaaatgcccggtttctgccgccgtcagtgccagacggattgtctcgctgtcacgcagctctccgagcaaaatcacatcaggatcttcccgcaatgcggcccgcaatccgcttgcgaacgtcatacagtgcaaaccaatttcccgctgctggatcaaacatcgctggctggcatagagatattcaacaggatcttccagcgtcagaatatgcgcatcggcatgttgattgagatagccaaccatcgccgccagcgtggtagatttgccactccccgtcgcccccgtcaccagaatcaggccattctcgctcttgagtaattccggcaataccgttggtgcgccaagctgttcgagctgcgggcagtggctaggtaacagccgtaacgccaggctaatgccatgccgttgcgcgaatgcgctgccacgcaatcgctggttttccgccaggctcacggcaaaatccagctgaccattctccagcaatattgcccgctgatcgtcatccagccactcccgcagtagctcttcgacgtccggcgtatcaaacggcgcagcttccattctgccgcgaatgcgccatcgtgcgggccaggcgctgcacaggtgtagatcgctgacgttatgctttacactaagggccacaatttcttccatattcatactaagatcctcggaaaatgaacgatattgcgcataacctggcacaggtccgggacaaaatcagtgcggctgcaacgcgttgcggccgttctccagaagaaattacgctgcttgcagtcagtaaaacaaaacctgcgagcgccatcgcagaagccattgatgccgggcagcgtcaatttggtgaaaactacgttcaggaaggggtagataaaattcgccactttcaggaactgggcgtaacaggattagaatggcattttattggcccgttgcagtctaataaaagccgcctggtggcagagcatttcgactggtgtcataccatcgaccgtttgcgcatcgctacccgtctcaacgaccagcgcccggcagaacttccccctcttaacgttctgattcaaattaacattagtgatgaaaacagtaagtccgggattcaactggctgaactggacgagctggcagctgcggtcgctgaactaccgcgtttacgtctgcgcgggttgatggcaatccctgcgcctgagagtgaatatgtaaggcagtttgaagttgcacgccaaatggctgtagcatttgccggactgaaaacgcgctacccgcatatcgacacgctctctctgggaatgagcgacgatatggaagccgccattgcggcaggtagcacgatggttcgtatcggcactgcaatttttggtgcgcgtgattactctaaaaaataaggaattaaaggaacgccatgaatacgttgactttcctgcttagtacggtcattgagctgtataccatggtgctgttattacgcatctggatgcagtgggctcattgtgatttttacaaccccttcagtcagtttgtagtgaaggtaacgcagccaattatcgggccactgcgccgcgttattccggcaatggggccaattgacagcgccagcctgctggttgcctatattctcagttttatcaaagccatcgtgctgtttaaagtggtgaccttcctgccaatcatctggattgccggtttactgattctgctgaaaaccatcggcctgctgattttctgggtcctgctggtgatggcgattatgagctgggtaagccaggggcgtagcccgattgaatacgtgctgattcagctggccgatccgctgctgcgcccgattcgccgcctgctaccggcaatgggtgggattgatttcagcccgatgatcctcgttctgctgctgtatgtcatcaatatgggtgtcgcagaagtattacaggcaaccggaaatatgctgctgccagggctgtggatggcgttatgaatgccgtaacagttaatgatgacggtctggttttacggctctatattcagccgaaagccagccgtgattctattgtcggtttacatggcgacgaagttaaagtcgccattaccgcgccgccggttgacggccaggccaacagtcatctggtgaagtttctcggtaagcaattccgggttgccaaaagccaggtggtgattgaaaaaggcgaacttggccgccacaaacaaattaaaatcattaatccgcaacaaatcccgccagaaatcgcggcgttaattaattaagtatcctatgcaaaaagttgtcctcgcaaccggcaatgtcggtaaagtgcgtgagctggcgagcctgcttagcgacttcggtcttgatatcgtggcccaaacagacctcggcgttgattccgctgaagaaaccggcctgacctttatcgaaaacgcgattctgaaagcgcgccatgcggcaaaagtgaccgctttaccggcaattgccgacgactctggtctggcggtagatgtgcttggcggcgcgccgggcatttactccgcgcgttattccggtgaagacgcgaccgatcaaaagaatctgcaaaaactgctggaaacaatgaaagacgtaccggacgaccaacgtcaggcgcgtttccactgcgtgctggtatatctgcgtcacgcggaagatcccactccgctggtatgccacggtagctggccgggcgtgattactcgtgaaccagcgggcactggtggctttggttatgatccaatcttcttcgtaccttccgaagggaaaaccgccgccgaactgacccgcgaagaaaagagcgccatttcccaccgtggtcaggcgttgaaactgctgctggacgctttacgtaatggttaaattacctccgctgagtctctacattcacatcccgtggtgcgtgcagaaatgcccgtactgcgatttcaactctcacgcgttgaaaggagaagtgccgcacgacgattatgttcagcatctgcttaacgatctggacaacgatgtggcttacgctcagggccgtgaagtaaagacaatctttattggcggtggtacgccgagcctgctttccggcccggcgatgcaaacgctgctggacggcgtgcgtgcgcgtttgccgctggcagcggatgcagaaattactatggaagcgaaccctggcacggtagaagccgatcgctttgtcgattatcagcgtgctggtgtgaaccgcatctctattggtgtgcagagttttagcgaagaaaagctgaaacgacttgggcgtattcatggcccgcaagaagcgaaacgcgcggcgaagctggcgagcggtttagggttacgtagctttaaccttgatttgatgcatgggctgccggatcaaagtctggaagaggcgcttggcgatctacgccaggccattgaactgaatccgccgcatctttcctggtatcaactgaccatcgaacccaatacgctgtttggtagccgaccaccggtgctgccggacgatgacgcgttgtgggatatattcgaacaggggcatcagttattaaccgcagcgggttatcagcaatatgaaacttccgcttacgccaaacccggttatcagtgccagcacaatctcaactactggcgctttggtgactacatcggtattggctgcggcgcacacggcaaagtgaccttcccggatgggcgcattctgcgtaccaccaaaacgcgtcatccgcgtggttttatgcaaggaaggtatctggaaagccagcgtgatgtcgaagccacagataagccgtttgagttctttatgaatcgcttccgtctgctggaggccgcgccgcgcgtggagtttattgcgtataccgggctttgcgaagatgtgattcgcccacagttagacgaggcgattgcccagggttatctcaccgaatgtgcggattactggcagataacggaacatgggaagctgtttttaaatagcctgctggagctttttctggctgagtaaacttgtattgccggatgcggcgtgaacgccttatccagccgacatgtggcagcggttgtaggtctgataagacgcgcaagcgtcgcatcagacgttgattgccggatgcggggtcaacgccgcatcctgctacaaatcgtgcactatatcaaacttacttaatcaccccattgcgccgcagttgttcggtatcttttttccagcgttcattagcttggttgatatcgtcaattttcatcaaaatcgcgacttttttactgtttatttcactaactttcatcgttaacggatattgccctttttcgagcgttacccagtcatcctgcaatttacggctaagtttttgactttgcagaaaagtctgtcgccgttgttcgttgatatcgaaatctcgtttctgctgaatcggcacttcataacactcttcactctgtttatgacatgccgcaatcgccggttgataaacctctttgtcatatttaaccgcgaacgcctcgctatcgttctgtttattaaactcatcacgctgttggtgaatttttttaaaggcgtcttcgcgggtcatttgcttaccgtttgcatcttttccccaatatgcatccgctgctttctgcgccgccaccatttgcttatcaagcgctttcacttccttttccagcgcaggaatgctgttcttctgggtattcaacgcagattcaagctgactaaagcgataattgaaatcttcgctattcacgatcagatatttattattcgttttgatatcgtcgaccacccgcccacgatcgctggctgccgcctgaaaagagtaaaagttcacgctccagccagacgcgggcgttcctttactggttaacatcgcgctgaattttaccggtttatctttcgtccaggtctgttcgagcagttcgtaatctgccaactgaccgacccaggtatagagatcgtcactggaagagacatcgccttccgcactccaggtggcctgattacccttagcatcaagattttttaaggtgatagcatcaagcttgagaatgccgtgatactgctttttgaattgatcttttaagatattttcagttggcggttcgccatctgcccaggcattaccagtcatcaacataagcagtgccgtgccaacaatccattgctttttcacccgaaaaacctcacgcggaataatttattccggtgattatcattagggtaattaaaattggcaatggacgtgagtctgaagtgaaaaagccccggcacgataccggggcgaggcgattagtactgattgaagatctgctggatctgctgcggatctttggtttgcgtcagagccagttgcagcagaacgcgcgctttttgcgggttcagcgtgccagaggcgacgaagccgtatttcgcatcatccacttcggcatcctgagtggtagcgcccgtcggtacgcgggaagaacgcacgactgcagtaccggttttcgcggcggtcgccagcgtgtcgaacacagatttatacaggttgccgttacccacaccagcgctaacgatgccatcatagcccgcatctaccagtgctttagccggaagatcggatgcgttagcgtagttataaacaatgccgactttcggcagttcattcagcttagagacatcgaatggcgtgtcgctggtatgcttacgtgccggggtacgctggtagtcaatcttaccgttgtgaatgtaacccagaggaccgtagttaacagacttgaaggtcgctacgtcggtggtgttggttttggtgacgtcacggccatcaagcacggtgtcattcatcactaccagcacgccacggttggcggaggctttatcagctgcggtcactaccgcgttatacaggttgaatggaccgtctgcgctcatagacgtggacggacgcattgcgccgaccatcaccaccggtttgtcgcatttcaccgtcaggtcgaggaagtaagcagtttcttccatcgtgtcggtaccgtgggtaatgacgaagccgtcggtcttatcgcagtcggtgttaatttttttcgccagtgtcagccagacattatcgttcatgtcctgggagccgatattcactacctgctcgcctttaacgttcgcaatgtcttttagttgcggcaccgcattaaccagattttctacgccaactttacccactgtgtagttagatttggttgcggagtcaccaccaccggcaatggtcccgccggttgctaaaatggtgatattgggtaatgccaatgctgcaccactaaaacccataaccagtgcggcaagtgccgtctttttgaaaaactccatttcattcctccagttacgtgaacgctacgcattatcccttagctctgtatgggaaatttgacgttaaacaatttacaacgtgaatatattttggagatctacaaagttagaggcaggtaacaaaacgaagaattaaacggcataaaaaagtattatgccgtcttaaaatagaggattattttaaattcccgaccagggctttgcggctatcttccagagtcacaacgcggctacaaacatctttgccaaactgctggaaatctttttcctgctttttccactcggtttggatactggattgcagcccccccaggcttcccagcacattctgtaatgggttaccgccgctttttcagcaccgctttcgcgcccatttcattaatgctgtcctgtaaaattccacccattgcctgattcactaattgctggccttcggcgcgaacctgatcaatggctttatagtgaaacgtcaggccatcgctgcgcgtttcaataatgcggttcatctgctctttcagctgcgcatcaagtttggtcagacggctgcgcattttgctgctttcgcccatctcctgaacgataattttatccagagcaatacgggctttctcgacgcggcttttcgcgccttcatcaatccacggcagcgtgctgcgtagttcagcctgataatccttcgcctgctcgcgctgggcggcattcagggaatattgcttaccgttatacatcacgttgccgtctggcgtgatcaccagattgccgttttcgcccttcacctgcacggtttgcgggctgacaatcacatcgtcacgcggcgtgacgctgcactggtagtcggcgtgagcggtcattgccgtcacactaagtgctgccgccagcagcattttgcgcatcatagtcttccctcaagaaaaaatcaggccagcatttgctggccccagattgataacaaagtacgcgttttccatgccggatgcggcgtaaacaccttatcccgcctactcgatcgtgcatctttccaggcctgataagcgtagcgcatcaggcagttttgcatttgtcatcgcccgtatgctttcttagtcccaccaaacgtcgaaaagttcgctggtgcgtacctcatccagtttgcgctcttccagccacttacgcacaatcgcctgatgttcttcggtgcatttgccgatttcctgcatgcagatcagaccttcccaggccagataaccgctgccgtcaaaggccagtttgttcggttcgataacctcgttaataaaatcatcaacggttttatcaatctgttcttcgcttgtaccttccgggaatcgccatgccacgctaaatcctaattcctggaattcgtcgatgtgcatttttttacgcagacgacggctacggttctttgccattatttcaccctctcgaacattaagtcccatactccgtgaccaagacgatgaccacgttgttcaaatttcgtcaccggacgacttgccggacgcggtacgtaatcattgctctcactcaggtttttataaccgtcaatagaagacatcacttcaagcatatgttccgcataaggttcccagtcggtcgccatatggaatacgccccccagctgcagtttgctttttaccagttcggcaaacggcacctgaacgatacggcgtttattatggcgcgctttgtgccacgggtcagggaaaaagagctgcaccatgcgcaaactattgtcaggaatcattttatgcagcacttcaaccgcatcgtgacacatcacgcgcaggttgcttaaaccttcttcatgcgcagaagccaggcacgcaccaacgcccggactatgcacttcaatgccgaggaagtcctgctcagggcgatctttagccattgccaccaggctcgcccccatgccaaaaccaatctcaagcgtcaccggcgcttcacggccaaaaagcgcggggaaatccagcatatcttcgctgaactcaacgcccatcaccggccagtagttttccagcgcatgttcctggcctttggtcagtcgcccctggcggcgcacaaaactacggatacggcgcagtgggcggccgttttcatcaaattccggactaatgacgtcgtttttcataaaggtttagtcgcttgtgaaagtgttctgaaaacgggcattatccaaagttagttgccggatgcaagcatgataaggccgtggctgcggaaagttccggtttacaccctgccgtcgctgtgctgcaatcttgcccccaacaacagtgaattcggtgaccatgcaagcgagccaatttagtgcccaggttctggactggtacgataaatacgggcgaaaaactctgccctggcaaattgacaagacgccctacaaagtatggctcagtgaagtgatgttgcaacaaactcaggttgcgaccgttatcccctattttgaacgctttatggcgcgcttcccgacggtgaccgatctcgccaatgcgccgctcgacgaagttctccacttgtggaccgggcttggctattacgcccgcgcgcgcaatctgcataaagcggcacaacaagtggcgaccttacacggcggtaaattcccggaaacctttgaggaagttgcagcactgccgggcgtcgggcgttccaccgcaggcgcgattctcagcctttctctgggtaagcactttccgattctcgacggtaacgtcaaacgcgtgctggcgcgctgctatgctgtaagcggctggcctgggaaaaaagaggtcgagaataaattatggagtttgagcgagcaggtgacgcccgcggttggcgtggaacggtttaatcaggcgatgatggatttgggtgcgatgatttgtacgcgcagcaaaccgaaatgtagcctctgtccgctacaaaacggatgtattgccgccgccaacaatagctgggcgctttatccgggcaaaaaaccgaaacagacgctgccggagcgcaccggctactttttgctattacagcacgaagatgaagtattgctggcgcagcgtccgccgagcggattgtggggcggtttatactgtttcccgcagtttgccgacgaagaaagtttgcggcagtggctggcgcaacggcagattgctgccgataacctgacgcaactgaccgcgtttcggcataccttcagccatttccacttagatattgtgcctatgtggcttcccgtgagcagtttcaccggctgcatggatgaaggcaatgcgctctggtataacttagcgcaaccgccgagtgttggcctagcggctcccgtggagcgtttgttacagcagttacgcactggcgcgccggtttaacgcgtgagtcgataaagaggatgatttatgagcagaacgattttttgtactttcctgcaacgtgaagcagaaggtcaggattttcagctgtaccccggcgagctgggaaaacgcatctataacgagatctccaaagaagcctgggcgcagtggcagcacaagcaaaccatgctgattaatgaaaagaaactcaacatgatgaatgccgagcaccgcaagctgcttgagcaggagatggtcaacttcctgttcgagggtaaagaggtgcatatcgagggctatacgccggaagataaaaaataaaaacagtgccggagcacgcctccggcaacttgcataaaaacaaacacaacacgcacccggaatgatgaaaaaatatctcgcgctggctttgattgcgccgttgctcatctcctgtagcacgaccaaaaaaggcgatacctataacgaagcctgggtcaaagataccaacggttttgatattctgatggggcaatttgcccacaatattgagaacatctggggcttcaaagaggtggtgatcgctggtcctaaggactacgtgaaatacaccgatcaatatcagacccgcagccacatcaacttcgatgacggtacgattactatcgaaaccatcgccgggacagaacctgccgcgcatttgcgccgggcaattatcaaaacgttattgatgggtgacgatccgagtagcgtcgatctctattccgacgttgatgatattacgattagcaaagaacctttcctttacggtcaggtggtggacaacaccgggcagccgattcgctgggaaggtcgcgcaagcaacttcgcggattatctgctgaaaaaccgtctgaagagccgcagcaacgggctgcgtatcatctacagcgtcaccattaacatggtgccgaaccaccttgataaacgtgcgcacaaatatctcggcatggtccgccaggcgagtcggaaatatggcgttgatgagagcctgattctggcaattatgcagaccgaatcttcctttaacccgtatgcggtcagccgttccgatgcgctgggattaatgcaggtggtacaacatactgccgggaaagatgtgttccgcagccaggggaaatccggcacgccgagccgcagtttcttgtttgatcctgccagcaatattgataccggcaccgcgtatctggcgatgctgaacaatgtttatctcggcggaattgataacccaacaagccggcgttatgccgtcatcaccgcctataacggcggcgcaggcagcgtgctgcgagtctttagcaatgataagattcaggctgccaatattattaacaccatgacgccgggcgatgtttatcagacgctgacgacccgccatccctctgcggaatctcgccgttatctttataaagtgaataccgcgcaaaaatcctaccgccgccgataattccattaaccgcccctgacgatgctcaggggcaaaaatgttatccacatcacaatttcgttttgcaaattgggaatgtttgcaattatttgccacaggtaacaaaaaaccagtccgcgaagttgatagaatcccatcatctcgcacggtcaaatgtgctttttcaaacactcatccgcatcacgatgtgaggaaattaacatgaatcttaagctgcagctgaaaatcctctcttttctgcagttctgtctgtggggaagttggctgacgaccctcggctcctatatgtttgttaccctgaagtttgacggtgcttctattggcgcagtttatagcagtctgggtatcgcagcggtctttatgcctgcgctgctggggattgtggccgacaaatggttaagtgcgaaatgggtatatgccatttgccacaccattggcgctatcacgctgttcatggcggcacaggtcacgacaccggaagcgatgttccttgtgatattgattaacagctttgcttatatgccaacgcttgggttaatcaacaccatctcttactatcgcctgcaaaatgccgggatggatatcgttactgacttcccgccaatccgtatctggggcaccatcggctttatcatggcaatgtgggtggtgagcctgtctggcttcgaattaagccacatgcagctgtatattggcgcagcactttccgccattctggttctgtttaccctgactctgccgcatattccggttgctaaacagcaagcgaatcagagctggacaaccctgctgggcctcgatgcattcgcgctgtttaaaaacaagcgtatggcaatcttctttatcttcagtatgctgctgggcgcggaactgcagattaccaacatgttcggtaataccttcctgcacagcttcgacaaagatccgatgtttgccagcagctttattgtgcagcatgcgagtatcatcatgagcattagccagatctctgaaaccctgttcattctgaccatcccgttcttcttaagccgctacggtattaagaacgtaatgatgatcagtattgtggcgtggatcctgcgttttgcgctgtttgcttacggcgacccgactccgttcggtactgtactgctggtactgagcatgatcgtttacggttgcgcattcgacttcttcaacatctctggtagcgtgtttgtcgaaaaagaagttagcccggcaattcgcgccagtgcacaagggatgttcctgatgatgactaacggcttcggctgtatcctcggcggcatcgtgagcggtaaagttgttgagatgtacacccaaaacggcattaccgactggcagaccgtatggttgattttcgctggttactccgtggttctggccttcgcgttcatggcgatgttcaaatataaacacgttcgtgtcccgacaggcacacagacggttagccactaattacgcaaagaaaaacgggtcgccagaaggtgacccgttttttttattcttacttcaacacataaccgtacaaccgtttcacgccatccgcatcggtttcgctataaacaccttgcagctccgggctaaatcccggcaacaaattcaccccttcttccagtgcaaggaaataacgttgaaccgccccaccccagacttccccgggtaccacgcaaagcacgccaggtggataaggcaacgccccttctgccgcaattcgcccttcggcatcacgaatccgcaccaactccacgtcaccgcgaatataagcgctatgcgcatcctgggggttcatcaccacactcgggaaactctgctggcggaacatcgctttttgtaggtctttgacgtcgaaactgacatacagatcgtgcatctcctgacacaactggcgcagggtgtagtcgcgatagcgcaccggatacttgttataaacgctcggcaacacctcaaccagcgggctgtcatcctcaatatgctgttcaaattgcgccagcatcgccaccagttgtgccagcttctcgtggctttccgccggagttaataaaaacagaatggagttgagatcgcacttctccggcacaatgccgttctcacgcagatagtgcgccagaatcgtcgccggaacgccaaagtcgctatattcgccggtttcggcatcgatacctggtgtagtgagtaacagcttgcacggatcaacaaaatactgatccgcggcatatccttcaaagccgtgccacttcgcccccggctcaaaactgaaaaaacggcggtcgctggctaacacacttgtcggataatcctgccacaatttgccatcaacaacgggcgggataaacgggcggaacagcttacagcgcgcaagaatagccttgcgcgcttcaatccctatctcaacacactcagcccacagccgacgcccactctccccttcatgaattttggcgttaacatccagtgcagcaaacagcggatagaaagggctggtagaagcatggagcataaaggcgttattcaaccgcttatgcgggcaaaaacgcgcctgtccgcggatatggttatcttttttatggatctggctcgtctgactgaatcccgcctgctgtttgtgcacgctctgagtcacaaagatccccggatcgttttcgttaagttctaacagcagcgggctgctatccgccatcatcgggataaattgttcataaccgacccacgcggaatcaaacagaatgtaatcacacagatgcccaacggtatcgatcacctgacgggcgttatagacagtgccgtcataggttcccagctgaataatcgccaggcgatacgggcgcggcaggtcggctttttctggcgcaacgtcgcgaatttgctggcgcagatactcttcattaaaacagtgcgcatcaataccgccaatgaaaccaaacgggttgcgactagcttccagatagaccggcgtcgcccccgcctgaatcagcgcgccgtgatgattgctcttatggttgttacggtcgaagagcaccagatcgccacgcgttaacagcgcattcgtcaccactttattcgctgcgcttgtgccgttcagcacaaaataggttttatcggcatgaaagactttggctgcgaatttctgcgcatctttcgcgcttccttcatgaataagcagatcgcccaattttacgtcagcgttacacatatcggcgcgaaagacgttctcaccaaagaaatcgtaaaaatggcgtccggcaggatgctttttaaaaaacgcaccatgttgatgtccagggcaagcaaaggtgctgttgcccatctcaacgtactgcgtcagcgtgtcataaaacggtggcagcaaattctcttcatactgacaggctgcggattccagctccagccactgctgctcgttgccgttgattaccgccgtaacgcccgcaggtaattcaacagcatgttcggaatacaaaaacaccggtagatgaaaaccggtgcgcttaagcaacgcaagaatgccactgcgactatccgcagcggtaatgacgactgccgcgacgtccgtaaaatcagtatctcccaacgccaccacgcgacgatgagaagaaagtcgggataccagttcactactggcggcaatattcatacttttcataagcgcaaacccgtttcggggaagtaagaataccggacaaggtggaaaaccctgccccatgagatatgggtcaaactggtcaccagctccgaccgccagacatcagtaaaagcagaaacgctctgattttactgttgtcctgcagtgagcgtgcgttaacttcaccgcatgagcagtaacatagaaagggaaacgtttcgcgcgaaacggcgataagcgagagaatgtaaggagatggcgtgcatcgggcaaactccgtacagagaggagaaaattcgcgcaatcatggcacctttcgctaaagcgtgcaagccaggactttgcgaacaaacaagccatcgacggcaccaaacggtcataataagaaaatcaaacaatacagctaacaggaactcttgtggtcatcggcccttttatcaacgctagtgcagtcttactgggtggcgttctcggcgcactgctcagccaacgcttaccggaacgtatccgcgtctccatgacaagtatttttggtctggcaagcctggggattggtattttactggtggtgaaatgtgccaaccttccagcgatggttttagctacgctacttggcgctctaattggcgaaatttgtttgctggagaaaggtgtcaatacagcagtcgccaaagcacaaaatctgtttcgtcacagtcgtaagaagccagcgcatgaatcttttattcagaattatgtcgcgattattgtcctgttttgcgccagcggcaccgggatcttcggggcgatgaacgaagggatgaccggcgatccgagtattttaatcgccaagagttttcttgatttctttacggcgatgatcttcgcctgcagcctgggtattgcggtaagcgtgattagtatcccattactgatcatccagttaacgctggcgtgggctgccgcgctgattttaccgctgaccacaccgagcatgatggcagacttcagcgccgtaggcggtttattgctgctggcaaccggattacgcatctgtggcattaaaatgttcccggtggtcaacatgcttccagcactccttctggcaatgccgctttccgccgcctggaccgcctggtttgcctgacaatgcgtgcaatatcggcaaagtgatgatagattgtgcagtctgcagtaaattgaagaaatttgattgacgagacgaggcgaatcaggtttaatgcgccccgttgcccggatagctcagtcggtagagcaggggattgaaaatccccgtgtccttggttcgattccgagtccgggcaccactaattcttaagaacccgcccacaaggcgggtttttgcttttggatctgacaataaccttcacgaaaaaaattagcttataaagtctgggggaattactctcgccacgttaacgagagtaattttattgatattaatctcctgatactttacccccgtccaaactccagccgctgcacattcaccatcccaggcttctcagcagcactgacatcaatttgtgtcacccgcagcgcatagaacgccattttgaatttacgaacggacgcattatcagtgactttaacggcatgggcaaagtgaaatatcattttttaacgataaaaagagtgttatttcttgtgtatcagacaataagcattcattcaaaacctttagaaataatcaaaacacaggtattccactggttaatatattcacatatgaaatgaataaatattggaatatataaatattgaatattttgattaatccccgtactgattattcttcataatcagtacggggttgctacaacatgtattactttttcaccacaattaacggttcaatatcactctcttttttgatgaccagactttcatcaccgcgcaaacacgtcccaccgtagttgccgccaacggtgaaggtacatacctgaatgtatttaccgtccactttcggcaaacaccacagttgctgatagatgtttttctgctcggcaaatttaccgctggttttgtccagcacctcttcatgatggctgacgaggtcgatattgctgccacagcgaccggcgatcggtttcactgcgtaacctgttttcaccagttcatcattaacagtgaaatcggtatccagcaggtaacgatggtgcgggaacaggctccagaggatcggcagaatcgctttgttgccggggatcaccgtccacagcggctcaaagaccagcacttccgggcgcagcaatacgtcgataagacgcacttcgttttgcggatgaccggtacggattggcaccgcagcaaactcacggtcgctaacttcacgaatctgatcaaacgcggtttcccacgcccaggttttccacacgcagttaaccagtcgcccttccccatcaatcagttgcccggcagcatcccagcccagttcatccaatccacgcaagatacgcgtttcaaagcccgcctggtgcagcgcctgctccataaactgcgcgtgatagttttcctcgatatctttgtcctgcatgatatggacaaacggacgtgcacgactgtgtttccaggcaccagccaattcgttaatcagcccttccgccggattgaagccgttgcctttatagccctgctccgcccaacgttcgaggatcaagcccgcttcggtatgacaggaggcggagtcggcgttgtactcgtaaaccttcaggccacgctcatccatgcagaaatccatacgaccagtgatcatatggtgacggcgacgctgccaggagagacgcaaacgtggccagaggattttcgggatgtcgaacagcgccagcaggttgtcatctttcagcaccttgtcggttgcgtgaagatacatcaggtgcagctcgttggtggctttaattagctcctgctcggcactctcggtaatggtgtagtaatgataaggatcctgattgatcacctgaccgttggcctgcacataggcgttttgcagcggatctttttcatccagccatttaccgtcaaactggcctttgttttccaggcgcgctccgctgattttcagcagctcgcctgcaatttccggctgcggtaagctgtattcagtatcttccgtctggatcatccagcccagaatggtggtgtcatcaaaagtgtctttcagggtatagcagccgttttcgaccaccatctccagctcgcgcgtccactgttgcccttgcggcaacggggaatgaatcacgttctgttccgcaatacggactttgttgccatgcaattgggtaatgatggcgacatggccagtgtctttaaattcaccgcctttatcccagataagaagcgcacccgcgaccggcgcacgcgggctgccgttaggaaatgcctgcaatggcaggatgttgtcattaaccacttctcgcaggaagcgcaggctgaaaatctcccacgccatacccacgtcagtaaagaccacaccgtaattcagaaagagaaaacggcgagcaaattcaacgcattgccacttgtggcccatatattcgtcgtcgatatagctacggaatacggcgtcatcttcgtattcctgcggatcgagagaactgtaatcactagagtagattgctaccccacctggggcgtagcccaataatgtcccgaacggggcatcctggctggtcgttcctttgctcatcactttacctttaacaatacaacctaagcagttggcgtaattgttgtgctctgattacctgctcagcgacattaaccggacagaggtcagactaatcatacacctcatcgcagcggctggcgcaaagggttaaaaaattcacattctgtacagcaagtgacctgctacactgcttcaacactaccactcagaaggcaactcactatgacagacaatacttatcagcccgcgaaagtctggacgtgggataaatccgctggcggcgcgttcgccaatatcaatcgcccggtttctggtccgacgcatgaaaaaacgctgcccgttggcaaacacccattgcaactttatagcctgggaacgccgaacggtcagaaagtaacgattatgcttgaggagctgctggcgctgggcgttactggtgcagagtacgacgcctggctgattcgtattggcgatggcgatcaattctccagcggctttgtcgaagtgaacccaaacagcaagatcccggcgctgcgcgatcatacgcataatccgccgatccgcgtgtttgaatctggtagcatcctgctttatctggcggagaaatttggctacttcctgccgcaggatttggcaaagcgtactgaaacgatgaactggctgttctggttacagggcgcggcaccgttcctcggcggtggttttggtcacttttaccattacgcaccggtaaagattgagtacgccatcaaccgctttaccatggaagccaaacgtctgctcgacgtgctggataagcaactggcgcagcataagtttgttgcgggcgatgagtacaccattgcggatatggcgatttggccgtggtttggcaacgtggtgttaggtggtgtgtatgatgccgctgagtttcttgatgcgggcagttataagcatgtacaacgctgggcgaaagaagtaggcgaacgtccggcggtgaaacgtgggcgtattgttaaccgcaccaacggaccgctgaatgagcagttgcatgagcgccatgacgccagtgatttcgagacgaatacggaagataagcgtcaggggtaagggttggtgttcgtcgcagcaagccatccaggccggataaggcgttcacgccgcatccggcaatcgtgcacaatgcctgatgcgacgctgccgcgtcttatcaggcctacgaaagctaatcatcacgcgctggtaatgtcgtaatccatttggcgcagtgcgtctaatgtggctttggcttcatcttcgtcgatgatgctcatggcaaatccgacgtgtaccagcacccactggcccagtagatcggcagggttaccttcacaaatcagggcgatattcacatcgcgcttgataccacatacttcaacctgcgcaagctggtgaatatcttcaccgacagccagcacctggcctggaacgccaatacacattattaactccggttattcaacttcaatacttttgacgatcaggctatcgccggtatcgacacgcaaccgctcgccgtgacagagcggacactgcgcatcgtgctgatgaatctccaccacctggctgcaatcccagcaccaagcctgggcgggtttatagacgatatgtaaatcgcacccttgcgccaccgttccgtggcagacaatttcaaaactaaaacggacggcgctctcctcaacgcaggagagcgcgccaatttccagccacacggcggtgacgcgcttaacatcgtgctgctccgcctgccgttggataatttcaacggcgctctggcaaagagacaactcatgcattttcgccactcctgcgaccaaacagcagggcgcgacgccctgcgtgtggtacatccggattcgtgactggcaggctaaggatcattcgtgcgcagtcatccgtcaggcgttggccctcttcaatgctcatgctgtggctaagcgggctcatcaggctacaggagagatattggctaacaccgtccagttcgccaacggtaaaggtcatagtgccatacggcagttgcagaccaattttttcactcactttgcgcagcggccagagttgatccgggccggggaagataactgcactcagcatccacggggtgatcacacaccccgtccactgaccttcgaacagcgtaaaatcagaaacatacaccggcatactaggatgcagaaaagagagatcgtgcatgctacgccgggcaatttcttcaaacgctgcctgtacttgcgccttcggggaggtctggaaacctgctatctcttcagtcatgaatcgcctcccgtgggatggcttccacgccagattcacgcagcgcagccagaacctgctcaagcgcaggttcaatcattgcttcaaccgtcggcgttaagccgatgtgtggctccaggctttccgggatcacgccgaccagggtcagctttttcggaaactcgccggtgaagcgcagggcgctcaagacgtcggccaggccaagctgatgcggagagattttgttggtaaacaacgccggaacttcttcatcccgcaggatcatcatcgttcccggcgcgttctttttgctgacaatggcatccgcaataatcaaatgatcgcgatttgccatgtcgccaagcagctccattcccgccgtgccgccatcgaggatctcaacataatccggcagaatgtatcgttgctctaacgcttcgacaatccgcacaccgatggcttcatcggtcagcaaaatattgccgacccctaagactaaaatacgcattacagaaccttcacactaaccacttcgttgccgtcagcatccactacgtgtaccgcacaggccatgcacgggtcaaaggagtgaatggtacgcaccacttccagcggtttattcggatcggcaaccggtgtacccaccaggctctgctcgtaaggaccgacgtcatcattgaagttacgcggaccagagttccaggtacttggaacaaccgcctggtagttgctgatgataccgtctttaataaccatccagtgagagagcataccgcgcggcgcttcgaggaagccaacacctttgaattcacccgttgccggaatgttcggcttcacaaaggtggtgtgatcgcctttgccgatattggtgatcagtgcactgtattggttttgcaggatatcctgcaattcacagcagtgaacggtacgaccaataatacggcccagcgtggagtgcagctgtgccacttccagcgtgttgccagtcagtttctgataaatcgcaacgatttcattcagtttgttctgggtagattcgcgacctgccgccagtttcaccagcatattagccagtggccccacttctaccgttttgccgtagaaagtcggacttttcacccaggaatatttcccgtcgtcagaccaaccatcataagccggaatggtggtgccttcccacggtgcctgcggcgcttcgtctttataccaggagtgcttcgcgctttcctgaatgcctttgatcaggtattcatcggaatgagaagtgatcggacgatagctggacagatccgcattctcaatgtagccgcccgggaacaggaagctgccgtttttactgtcggtcgggaattccggcacgctcaggtagttcaccgcacctttaccgcgtgtcagccattccgggtagaacgcggcaataactgcggtatcaaccttataaacctgctcaacaaagtcgctcagtttgtcgatgaaagacttgatgtacatcaggcgctcaaggttcagcacgcccaaaccgtcgaggttgatcgggttcgcgacaccacctaccgccaggttctgaatgtgcggcgttttaccgcccagcagcgccacgacgcggttagcgtcacgctggcactccaacgcttgcaggtagtgcgctaccgcaatcaggttcacttccggcggcagtttcatcgccggatgaccccagtagccattagcgaaaatacccaactgaccgctggcaaccagatctttgatcttgttctgaactttggtgaactcttccggactgttcaggtgccaggtgctaacgcctttcagcatttcggaggctttggttgggtcagcttgcagtgcagaagtgatgtccacccagtccagcgcgctaagctgatagaaatgaacaatatggtcatgcgtggtgtgcgcagccagaatgatgttacggatgtattgcgcgttaaccggaacgtcgatattcagcgcactttctgccgcacgaacggaagacagcgcgtgagtggtagtacatacgccacagatacgttgcacaatcatccatgcatcgcgcggatcgcggtttttcacgatctcttccatgccgcgccacatggtaccggaagcccatgctttgctaacgacgccattttcgatttcgcaatcgatgcgtaaatgcccctcaatacgggttaccggatcaatagtaattctctggctcatgctttgctcgcctcatgacgattatgatcgttttgttttaaaggaggaagtatcggcagtagacgaatgagtacgatgtaagcgcaaatctcaatagccacaaaaccaatagaaatcaacagttcttcccaggtcgggaagtaggcgtaaccgccgcccgggttgaatgccaccaggctataggtcagacgccaggttgcacaacctaacagtgcgctcagtgcactcaggaacagcatgcgggaatcattacgcagcttcgccacacgcagaacgaccagcgggaagagcatcagcaggacttcaatccagaacatcacggagtagaagtcaccggcaaacgctaagctcagcttgtcgcgatagataagctcgccaaagcgcagcacgatgaaaatcgccagcaacacactgatggtgttggtcagcttaacaaacagactcttttcatccggaccgttgccacgcagacccgcctgcaccaggctaccttcaaagatgacaatgctgaagcccatgatgaacgccgtcagcaggctgaacagcggcaacatttcatagctctgccacaacggatgcaccttgtagcccgcgctgatcatcaggctccccatactagactggtgcatggtcggcagcagcgcaccgagcgcgatgatgaagaacatcaccttgtttagtcgctgtaggctcaccttccaccccagacgttcaaacagtgccggagcaaactccagtgccatcacgccgatatagatggtcatacagaccgccgtctcgaacagtacgctgttcacgttgaagtgacccggaatgtagaagtacggcaggttccagtagcgacccacgtcgatagtgatgctcaagccacccagactgtaaccaaacagactcgccaacagcgccggacgcaccagcggatggtattgcccacggttaaagacgtataccgcccacgccagcgcccagccgccacaggcaaagccggtgccaatcagcaggtcaaacgcgatccacacgccccacgggaagccgccgttcaggtcagagacagagcccagaccgaacaccagacgcttcacaatcaggagcatacagatgacgattaacggtccaaaaatcatgaccggtttactgatgattttgccgcccagcggttgtggatcatgactcatgatcgtctcctccgtcgtgattattcaactctcatgatcgtctcctccgtcgtgatggtcgtttttggtgttgcgacgaaccagcacggttaagcccgccagcacagccagtggtagcatcatgcctttatacagggtgtgttgaatattttcggaacgcgcaccggtagaaagatcgtccagtttcggcaggtcgagattttcataaggcacacccgtcagtaccagaacctgagtaccgccgccctctttctcgccgtacagatgcggataatatttcggcaccgtatgcaggtaagtgtcgccagatttcagcgtctgacgcggatagtggtattcgctgccaggcttcagcgccagacgttttttcgcctccgccatcagctcttcacgcgtaccgaaaatcaccgcgcccgccgggcacacttctacgcagccaggtagaccgcctttatcgagacgttccacacctttctggttgcacagctcgcacttatgcagcgcaccaaacgggttgttgtagtcgtacttcggcacgttgtacggacaggcgaccatgcagtaacggcagccggtgcacacatctttgtcgtaatggacaatgccggttttcggatcttttttcagtgcagagaccgggcacacagagacacagttcggatcgacgcagtgcatacactgtttcttaatgtacgcgtagccgttctcctcctggtctttgttgacccctgtgccgctggtccacacctgaatgatgttattggtatacgggctcagtttgtcgttgttgctccaggtctgttccccttgcgggttacgttcagggaaattgatatcctgacacttggtgacgcaagcctggcagcctacgcacaaggtgctgtcgtacaacatccccaggcttcccggaattggcgggcggttttcagcagccgcatgactgacagacggcagcgcgcccgtcagcaatgccccgcaggaggctgctttaataaaattacgtctgttcacggttattctccccgactgtcagcgttatctttcttttgctgacgacccagttcacgcaccgccatcacgctgacaccggcaaccaacccaaccacaccgccgagcaaaccaatagcgcctgcagagacgttgccgccctctttagcgttaacatccggtttctgactacgcggagtttgattttcgacgttggcaagctgatggatgcctttatggaagccgataccttcttcgttacagccatagcaagggtgaccaatcgccaccggccacacaccgccaacatcgcagaattgcagcgtactgcagttgccgtaagtttctggccctttacagccgaggtggtacaggcaccagccttcgcggtggccttcatcaccgaactctttggcaaaacgaccagcatcgaagtgcgggcgacgttcgcagtgttcgtgaatcagacggccataggcgaaggtcggacggtttttgtcatccagtttcggcggtttgccgtaagtgatgatgtgcgcaacggtcgcgaggaagttgtgcgggttcggcgggcagcccggaatattgataacggttttgcctggcagaacttcttgcaggctgactgcgccagttgggttaactccagctgcggcaacaccgccccacgcagagcaggaaccgatagcgataatggctgctgcgccttccgccgctttgcggatgtgatccacaatcggctcaccggcaaccatgcaataaataccgttatcttttaatgggatggaaccatccaccactaacacatactgccctttgtacttctcgagagcgttatgtttgttctcttcgacctgatgaccgaaggcggcggaaagcacttcgtgatactccagagagatagtctccagtacgaggttttctaccgttggatgcgttgcacgaagcagagattccgtacaaccggtgcactcctgcgcgccaatccagataactggcggacgctgcgggttagtaacgctttcggccatctctgcagcggctttgctacttaaccccatggtggcggctaatgctgcacaaagcttcatgaaatcacgacggttaatgccgtgagaatggatgagggtgttatctccagtcatttatagttattccgttgcgaagacctggcatatattttgcctcaatcgcaaaatcaataatgcgatcgatgcgccatttaccacacatttattatggttatcgatatcatgatactgcggcggggcgctaaaacgaagggaagaagcattagtgtaattaattaaagcaagataatacgtatgtttgatcaattttcgaggcgataaccggccataaaaaagcgcaacgtagaacaggaattattctcacgaaagaaatccattaccatctctttatccagtccatagcggcgcgtcagaatacccgcttcccaggcgctaagctggcgatctccggtcttttcgtacatccggtgactgtagcctaatacaaaaccgcgtttataatcggcacagaattttgtcacattaaccgcactgtcggcatgcgttgcttttaatcccgccattaagcctttaccaaaatggttattcatcgttcacctcattcgctatatattgtcatatatagcgatattttaggcaaagaacgacttttgcgcacgctattttttcatgcttgtttaagacgtaatcccgtaagagataaacctatcaggagagatatttatcgaaccatttcagtgtcctttgccaggcaagatcggcggcagatttgtcataacggggcgtggaatcattatggaatccgtgattaacccccggatagatatacgcctcataaaccttattattggctttcaacgccgcctcgtaagcaggccagccctcgttgattcgggtgtccagttccgcgaagtggagtagtaaaggcgcttcaatcttcgccacatcggcagtgggtgcctgacgaccataaaacggcaccgcgcaggccagttccggatacgcgacagccgccgcgttgcttacgccaccgccatagcaaaatccggtaatacccactttgcctgtcgcttgcggatagcgttgcataaactcaattgcggcaaagaaatcattcatcagtttgttggatcaacctgctgttgcagctcacgacctttatcatcatttcccggataacctccaacggaacttaagccgtcaggtgccagggcgatataccccgccttcgccactcgccgtgccacatcttcgatatacggattcagtccacgattctcatgcaccaccactacggctggcgttttgccgctcatctttgcgggcttcaccagataaccccgcacctcgccgtgaccatttgggctaggatacgtgatgtactcagcaacaatttccgggtcggtaaactctacctgagtcgccagcgcataatttggcttgagcaaatcaaacaacgctaatgccgtcatcccgcctaccgcacttcgccgcaaggttgaggaactcacgtttcgagattttcccgtgagcgtaatagtcatagtaatccagcaactcttgtgggaaatctttggcggttaaacgcggcatcgttgcactcctcagttggtgtttttttaagcaaagcataagcacgtatttttgcccagtttttcgtcactctgtgagccagactacgggatacgcgctggcgaatcgctaaactagaaacattgtttcgaaattgaacggtggaaaggagaggtcatggtctggttagcgaatcccgaacgttacgggcagatgcaataccgctattgcggaaaaagtggtttacgcctgcccgcgttaagcctcggtttatggcacaatttcggtcacgttaacgcgctggaaagtcagcgtgcgatcctgcgtaaagcgtttgatttgggcattacgcactttgatttagccaacaattacgggccgcctccaggaagcgcagaagagaactttggtcgcctgctgcgggaggattttgccgcttatcgcgatgaactgattatctctaccaaggctggctacgatatgtggcccggcccttacggctctggcggtagtcgtaaatacctgctcgccagcctcgaccaaagcctgaagcgtatggggcttgagtatgtcgatatcttttactctcatcgcgtcgatgaaaatacgccgatggaagaaaccgcctctgcgctggctcatgcggtacaaagcggtaaggcgctgtatgtcgggatctcctcttacagcccagagcggacgcaaaaaatggtcgagttgctgcgcgagtggaaaattccgctgttaattcatcaacctagctacaatttactgaaccgctgggtggataaaagcggcctgctggataccctgcaaaataacggcgtgggctgtattgcctttactcctctggctcagggattgctgaccggaaaatatctcaacggcattccgcaagatagtcggatgcatcgtgaagggaataaagttcgtggtctgacaccgaaaatgcttaccgaagccaacctcaacagcctgcgcttattgaatgaaatggcacagcagcgtggacaaagtatggcgcaaatggcgttaagctggttgctgaaagatgatcgcgtgacgagcgtattgattggtgccagccgcgcggagcaactagaggagaacgtgcaggcgctgaataatctgacatttagcaccaaggagctggcgcagattgatcagcatatcgccgatggcgagctgaatctgtggcaggcgtcttccgataaatgacctgttaataacgggcgcgcgaaccgcgcccgaatcagatcagtgattatgacgagtcagtcggtcaagatagcccatcacaaatgcagaaagcacaaacgtcagatggataatgacgtaccacatcagtttgttatccgggacatttttcgcatccataaagacgcgcagtaagtgaatggaagaaattgccacaatgctcgctgctactttgtttttcaggctcgttgcgtccattttccccagccagttcagcttctctttgttctcggagatatccagctgactgacgaaattctcataaccggaaaacatcaccatcaccagcaaaccgccaaccagcgtcatatccaccaggctcagcaacacgaggatcaaatcactttccgccatgctgaagatattcggcagtacgtgaataatctcctggaagaacttcagcgccagggcaactaacgccaggctaaggccaaagtacacgggggcaagcagccagcgagaagcatacattgcattttcaagaaaacgttccatacattcctgtcgtgtagttaaaacgggcaacagtatatcgcaattgagtaaacagcacgcaacagcaaatcaacatatacgttaaacctttgtcgcataattctgaggtttagggatcttcctggttcccttatcaacgcatcgagaacgtctacccttaaaggacgttgaacctgaagggagaaaaacgatgtctcatttaaaagacccgaccacgcagtattacactggtgaatatcccaaacagaaacaaccgacgccaggcatccaggcgaagatgacaccggtaccggattgcggcgagaaaacctatgttggtagcggtcgcctgaaagatcgtaaagcactggtgacagggggcgattccggaataggtcgcgctgccgccatcgcttacgcgcgtgaaggggctgacgtggcgatcagttatcttcccgtggaagaagaagacgctcaggatgtgaaaaagatcattgaagaatgcggacgcaaagccgttctgctgccaggcgatttaagcgatgagaaatttgcccgtagcctggttcacgaagcgcacaaggcgttaggcgggctggatattatggcgctggtcgccgggaaacaggttgccattccggatattgcagacctcaccagcgaacagtttcaaaagacctttgccattaacgttttcgcgctgttctggctaacccaggaagcgatccccctgctaccgaaaggtgcaagtatcatcaccactagcagtatccaggcataccagccaagtccgcatttactggactatgcggctacgaaggcggcgattctgaactacagccgtggcttggcaaaacaggtcgcggagaaaggtattcgggtgaatattgtcgcgccaggcccgatctggacagcactgcaaatttccggcggacaaacgcaggataagatcccgcagtttggtcagcaaacgccgatgaaacgtgcggggcaaccggcggaactggcccctgtatatgtttatctggcaagtcaggagagcagctacgtcaccgcagaagtgcacggcgtgtgcggcggcgagcatttaggttaaaaaaatgcccggttgtgaaaagcaaccgggcatcattgtgaattcactcttacctgatgtggcgaaaacgccttatccgcctacaaacgcatgaagattcaacatgttgcaatagattttgtaggcctgataagcgtagcgcatcaggcattgagcacctaatgccggatgcgtcgtgaacgccttatccggcctacaaacgcacgaagattcaacatgttgcaatagattttgtaggcctgatgagcgtagcgcatcaggcaattctactttacttcgctttggcggtttcttcgccgaccagacctatcttcaggtaacccgcctgatgcagcgtatccattaccttcatcaacgtctcgtaatcgacggttttgtccgctcggaagaagatggtggtgtctttcttgccttcggttaacgcattcaacgccgtaatcattgtttcatcggtgaccggatcgttaccgataaacatgctgttgtctgccttcacgctcagataaaccggtttttccgggcgcggctgcggcgtgctggtagaagcaggcaagttcaccttcacatctaccgtcgctaacggtgccgccaccataaagataatcagcagaaccaacatcacgtcgataaacggcgtcacgttgatatcatgcatttcgccgttatcgtcgaggttttcgttaagatgcattgccatcggatattatcctgcgcgtaatttttgtgcgacacgaaccggatgcgcagcggcgctggcttccagatccaggtcacggctttgcagcaacaatacctgcgctgcaacatcacccagcatcgctttaaagccgccaatctggcgtgcaaatacgttatagataacgaccgcaggaatcgctgccacgaggccgattgccgttgctaacagagcttctgcgatacccggcgcaacgactgccaggttagtggtctgcgtttgcgcgataccaataaagctgttcatgatgccccagaccgtaccaaacagaccaacgaacggagaaatcgcgccgatggttgccagatagccgttaccgcggcccatttgacgacccactgcggcgacccgacgctccagacggaagctggtacgttctttaataccttcgttatcgtcgctgccttcactcagttccagctcattctgcgcttcattgagcaaatgcaggcttaagcttttgctaccaaaatcagcggcgatatcgttggcctggtttaaggaacgcgcttcagccagcagttgctgctcgcgcttaaggcgacgcttctgattgaagaactctacgctcttactgaagaagattgcccaggtgactacggaggccaaaataagcccaatcatcacgcacttaacgacaatatcggcgtgctgatacataccccagacggaaaggtccgtctgcattaaattattacccactgtgtatctccaggacgcaagtcacaaaatctgcgcataataatatcaaaacgacgtcgaattgatagtcgttctcattactatttgcatactgccgtacctttgctttcttttccttgcgtttacgcagtaaaaaagtcaccagcacgccatttgcgaaaattttctgctttatgccaattcttcaggatgcgcccgcgaatattcatgctagtttagacatccagacgtataaaaacaggaatcccgacatggcggacaaaaagcttgatactcaactggtgaatgcaggacgcagcaaaaaatacactctcggcgcggtaaatagcgtgattcagcgcgcttctagcctggtctttgacagtgtagaagccaaaaaacacgcgacacgtaatcgcgccaatggagagttgttctatggacggcgcggaacgttaacccatttctccttacaacaagcgatgtgtgaactggaaggtggcgcaggctgcgtgctatttccctgcggggcggcagcggttgctaattccattcttgcttttatcgaacagggcgatcatgtgttgatgaccaacaccgcctatgaaccgagtcaggatttctgtagcaaaatcctcagcaaactgggcgtaacgacaagttggtttgatccgctgattggtgccgatatcgttaagcatctgcagccaaacactaaaatcgtgtttctggaaagcccaggctccatcaccatggaagtccacgacgttccggcgattgttgccgccgtacgcagtgtggtgccggatgccatcattatgatcgacaacacctgggcagccggtgtgctgtttaaggcgctggattttggcatcgatgtttctattcaagccgccaccaaatatctggttgggcatagtgatgcgatgattggcactgccgtgtgcaatgcccgttgctgggagcagctacgggaaaatgcctatctgatgggccagatggtcgatgccgataccgcctatataaccagccgtggcctgcgcacattaggtgtgcgtttgcgtcaacatcatgaaagcagtctgaaagtggctgaatggctggcagaacatccgcaagttgcgcgagttaaccaccctgctctgcctggcagtaaaggtcacgaattctggaaacgagactttacaggcagcagcgggctattttcctttgtgcttaagaaaaaactcaataatgaagagctggcgaactatctggataacttcagtttattcagcatggcctacagctggggcgggtatgaaagcttgatcctggcaaatcaaccagaacatatcgccgccattcgcccacaaggcgagatcgattttagcgggaccttgattcgcctgcatattggtctggaagatgtcgacgatctgattgccgatctggacgccggttttgcgcgaattgtataacattgccacttttggacaattttgcagacattttattgtgaaaagtcttaaattgttgcgtccgggatcaaggcgtcccggacgattcaggagtacaataggcagataaaggcttaaacgctgttccacaggaaagtccatggctgttattcaagatatcatcgctgcgctctggcaacacgactttgccgcgctggcggatcctcatattgttagcgttgtttactttgtcatgtttgccacgctgtttttagaaaacggcctgctgcccgccagttttttgccaggcgacagcttgttgatactggcaggcgcattgattgcccagggggttatggattttctgcctacgattgcgattctgaccgccgcagcaagtctgggctgctggctaagttatattcaggggcgctggttagggaataccaaaacggtgaaaggctggctggcacagcttcctgctaaatatcaccagcgcgccacctgcatgtttgaccgccacggtctgctggcgctgctggctggacgttttcttgcatttgtccgtacgctgctgccaaccatggcgggaatttccggtctgccaaaccgccgcttccagtttttcaactggttaagtggattgctgtgggtcagcgtggtaaccagttttggctatgccttaagtatgattccgttcgttaaacgccatgaagatcaggtaatgacgttcctgatgatcctgccaattgccttgttaaccgctggcttgttaggcacgctgtttgtggtgattaaaaaaaaatactgtaacgcctgacgattttccccgttcccggttgctgtaccgggaacgtatttaattcccctgcatcgcccgcattcttgccgcatcttcccccggcgtcacaccgaagtaacgtttaaactcacggctaaattggcttgcgctttcatagccgacgcgcatcgctgctgcgctggccttcatgccgtcatggatgatcatcatccgcgccttatgcagacggtaattcttcaaatactgcaacgggctggtactggtgacagacttaaaattatggtggaacgcgcttacgctcatgttggcttctgccgccagttgctcgacgctcaggttttcggtgtatttattctcaatccgtttcagcacgcggctaatcagactgaagtgagtctggcgactgaccagcgccagtaacgcgccgccgcaaggtccggtcagcacgtagtacagaatttcgcggatgatctgtttgccgagaatacgcgcatccagtggtcgctccatcacgtcgagtaaccgctccgccgcgcataaaatctcttcacttaacgtggcggagttaatcccgctggctgccatgctcggctggaaatgctcatcttcgccaatgtccatcaacagttcctgtaactgcaaaatatcgacattgagacgcaaccctgccagcggcacctcactcgtggcataggtttcgcactcaaacggcaacggcaccgtcagcagcaggtattcattggcatcataacgaaacacgcgttcattgatataaccgattttatgcccggaaaagagaattatgatgccaggctcgtacatcaccggtgtacgtgcgaaaggcgtctcgccatacaacaaacgcacatcgggcaacagtccactcaaactattttctttatttttcagtttattaactttatccgccagcaagcggcaaatctcttcacgtttcatatcgcgtaatttcttaggaataatgcggcaattactttgtgcgcaattttgtagcatttctccagcactctggagaaataggcaagacattggcagaaatgagcattgagagccagggcgctggcgatcacaatgaaaaacatcaggcagatcgttctctgccctcatattggcccagcaaagggagcaagtaatgaacaactttaatctgcacaccccaacccgcattctgtttggtaaaggcgcaatcgctggtttacgcgaacaaattcctcacgatgctcgcgtattgattacctacggcggcggcagcgtgaaaaaaaccggcgttctcgatcaagttctggatgccctgaaaggcatggacgtgctggaatttggcggtattgagccaaacccggcttatgaaacgctgatgaacgccgtgaaactggttcgcgaacagaaagtgactttcctgctggcggttggcggcggttctgtactggacggcaccaaatttatcgccgcagcggctaactatccggaaaatatcgatccgtggcacattctgcaaacgggcggtaaagagattaaaagcgccatcccgatgggctgtgtgctgacgctgccagcaaccggtagtgaatccaacgcaggcgcggtgatctcccgtaaaaccacaggcgacaagcaggcgttccattctgcccatgttcagccggtatttgccgtgctcgatccggtttatacctacaccctgccgccgcgtcaggtggctaacggcgtagtggacgcctttgtacacaccgtggaacagtatgttaccaaaccggttgatgccaaaattcaggaccgtttcgcagaaggcattttgctgacgctaatcgaagatggtccgaaagccctgaaagagccagaaaactacgatgtgcgcgccaacgtcatgtgggcggcgactcaggcgctgaacggtttgattggcgctggcgtaccgcaggactgggcaacgcatatgctgggccacgaactgactgcgatgcacggtctggatcacgcgcaaacactggctatcgtcctgcctgcactgtggaatgaaaaacgcgataccaagcgcgctaagctgctgcaatatgctgaacgcgtctggaacatcactgaaggttccgatgatgagcgtattgacgccgcgattgccgcaacccgcaatttctttgagcaattaggcgtgccgacccacctctccgactacggtctggacggcagctccatcccggctttgctgaaaaaactggaagagcacggcatgacccaactgggcgaaaatcatgacattacgttggatgtcagccgccgtatatacgaagccgcccgctaagctttttacgcctcaaactttcgttttcgggcatttcgtccagacttaagttcacaacacctcaccggagcctgctccggtgagttcatataaaggaggaacgtatggctaatccaaccgttattaagctacaggatggcaatgtcatgccccagctgggactgggcgtctggcaagcaagtaatgaggaagtaatcaccgccattcaaaaagcgttagaagtgggttatcgcagcattgataccgccgcggcctacaagaacgaagaaggtgtcggcaaagccctgaaaaatgccagtgtcaacagagaagaactgttcatcaccactaagctgtggaacgacgaccacaagcgcccccgcgaagccctgctcgacagcctgaaaaaactccagcttgattatatcgacctctacttaatgcactggcccgttcccgctatcgaccattatgtcgaagcatggaaaggcatgatcgaattgcaaaaagagggattaatcaaaagcatcggcgtgtgcaacttccagatccatcacctgcaacgcctgattgatgaaactggcgtgacgcctgtgataaaccagatcgaacttcatccgctgatgcaacaacgccagctacacgcctggaacgcgacacacaaaatccagaccgaatcctggagcccattagcgcaaggagggaaaggcgttttcgatcagaaagtcattcgcgatctggcagataaatacggcaaaaccccggcgcagattgttatccgctggcatctggatagcggcctggtggtgatcccgaaaagcgtcacacctagtcgtattgccgaaaactttgatgtctgggatttccgtctcgacaaagacgaactcggcgaaattgcaaaactcgatcagggcaagcgtctcggtcccgatcctgaccagttcggcggctaacatgcaaattctcccggtggcggtaatgttccgctaccggacttttcagaaatcatttattcccctcgcgtcccgcccgttgttactcttccttgttcaggaatgccaaatataaggacatcatcatgcagagccggaagctcttaaaagaacaactcatctatatccgggataaacgcaacggagaggtgaaaaacagatgaaaataatacttctgtttttagcagccctggcaagttttaccgtacacgcacagccccccagtcagaccgtagaacaaacagtccggcatatttatcagaactataaaagtgatgccactgccccttattttggtgaaaccggagagcgggcgataacttctgcgcgtattcaacaggcgcttaccctgaacgacaatcttacgctgccgggcaatattggctggctggattatgatccggtttgtgattgtcaggattttggcgatctggtgctagaaagcgttgcgataacccaaactgacgccgatcatgccgatgccgttgtgcgctttcgtatctttaaagatgataaagaaaagaccacgcagacactgaaaatggtggcggaaaatggtcgttgggtcattgacgatattgtcagcaatcatggcagcgtcttacaagcagttaatagcgagaatgaaaaaacgctggccgctttagctagcttgcaaaaagaacagccggaagcctttgttgccgaactctttgaacatattgctgattatagctggccgtggacgtgggtggtttccgactcttaccgccaggcggttaatgccttctataaaaccaccttcaagacggccaataatcccgatgaagatatgcaaatagaacggcaatttatttacgacaatccgatctgttttggcgaagagagcctatttagtcgcgttgatgaaattcgagtcctggagaaaaccgccgattccgcccgcattcatgttcgttttacgctgaccaatggcaacaacgaagagcaagaactggttttacagcggcgcgaaggcaagtgggaaatcgctgattttatccgcccgaacagcggcagcctacttaagcagattgaggcaaaaactgccgccagattaaagcaatgagctgaattaaataacaattagccggaacaataaataaaagggaacactatatgaaaacgattttcaccgtgggagctgttgttctggcaacctgcttgctcagtggctgcgtcaatgagcaaaaggtcaatcagctggcgagcaatgtgcaaacattaaatgccaaaatcgcccggcttgagcaggatatgaaagcactacgcccacaaatctatgctgccaaatccgaagctaacagagccaatacgcgtcttgatgctcaggactattttgattgcctgcgctgcttgcgtatgtacgcagaatgataaaaaaatccccggtagcgtgtcagttgccggggatattttttaacgtccaaccgccgctttaggccgtttcttcgcaccagcattcaccggacgagattgcgtagagctcgctttttttgccgtagcaggcgtctgacgctgggtcgccatcggcgtatgtttcgtcaacgccggacgggtattgcggttctggcgacgagcttcacgcatctcttcaatggttggcgcaggcactaagcaatcgcgacggctgccaatcagatgctttttgcccatcgcttccagcgcctggcggattaacggccagtttgccggatcgtggtaacgcaacaacgctttatgcaaacgacgctgtttgtcgcccttcggtacgaagacgtcttcgctcttataaccaatcttcgccagcgggtttttcccggtgtaatacatggtggtactgttcgccagcgggctcggatagaagttctgcacctggtcgaggcggaagcggtgctttttcagccacagcgccagattcaccatatcttcatcacgcgtaccggggtgcgcggagatgaaataggggatcagatactgctctttacctgcctgtttactgtaagtatcgaacagctctttaaagcggtcatagctgcccatgcccggcttcatcatcttgcttaacggcccttcttcggtatgttccggggcaatcttcagataaccgccgacgtgatgggtcgccagttctttgatatagcgcggatcttctacggctatgtcataacgcacaccagaggcaatcaggatctttttaatgcctttcagatcacgcgcacggcgatagaggttgatcgttggttcgtggttcgtgtccatgtgcggacaaatatccggataaacgcagctcaaacggcgacaagtttgttcagcgcgtgggcttttgcagcgcaacatatacatgttggcagttggcccaccaagatcggaaatcacgcccgtaaaacctggaacggtgtcgcggatcgcttcgatctcattaatgatgctatcttcggaacggctctgaataatgcgcccttcgtgctcggtgatagaacagaaagagcagccgccaaagcagccacgcataatgttgacgctaaaacggatcatttcgtaagccggaatacgggcattgccataggccggatgtggcacgcgcttgtatggcagcgcaaaaacgctgtccatctcttcggtagaaagcggaatagcaggcgggttgatccacacatagcggtcgccgtgtttttgcatcaatgcgcgggcacagcctgggttggtttcgtggtgcagaatacggctagcatgggcgtacagcactttatcgcccttcactttctcgaaagaaggcagcaacacgtaggttttttcccacggtttcgggcgcggtggctgcacggttacggctttggcttcctgctttttcggtgccaccggtttgttatccgcgcacggcaaatcttcaccatacggatgcgggattgggtcgatttttccaggggtatcaagacgggtggaatccacgccgctccagccaggcagcgcctctttcacgataatcgcggtattacgcacatcgcggatttcactaattggctcgcccatcgccagacgatgcgccacttccaccagcggacgctcaccgttaccaaacatcagcatgtcggctttgctatccaccagcacggaacggcgcacggtatcggaccagtaatcataatgcgcggtacggcgcagactagcctcaataccgccgaggatcaccggtacatctttccacgcctctttacaacgctgggtataaaccagtgtggcgcgatccgggcgcttacccgcgacgttatccggcgtgtaggcatcgtcatgacgtaaacggcgatcggcggtataacggttgatcatgctatccatgttgccagcagtaacaccgaaaaacagattcggtttacccagacgcataaagtcgtctttgctgctccagtccggctgggcgatgatcccgacgcgaaagccctgcgcttccagcatacgaccgcaaatcgccatcccgaagcttgggtgatcgacatacgcgtcgccagtaaccaaaatgatgtcgcagctatcccagccaagttgatccatctcttcacgagacatcggcaaaaacggtgccggtccaaaacaggcggcccagtactgcggccaggagaacaggtcgcgatccggttggatcagggagatagagctcattttgcttccagaaatgataaaaaaataatcaaaggccggggattataagccggaacgaaagagaaatcgaaaggtattccatactcgccctcctcgggcgagtatgaagattacggtaccggattgaccaacagttgcccaatgctgccacggtccgccatttccagcgtctgactgttgaagtagaacgggaagtgcgcccaggaaggctgaccgaaataaacaagcagctccacttgtccgtcaacccaaacggtatctttccagcctctgtcttccgggaacggcatcgcgccattcacgttacggatctggaacattacgccttcaatatggaacgcttgcggctcgtccgcgcgtaccgtccagcgttcccacgttccttgctgcgcggtgacatcaatacggttgacgtcccacagctgtccattaatacccgggtcatcacccagactgatatcgcgactgcgaattgggctaccagccatgatttcagttggcagcaagcgcatcggaagactgtctgtgaccagcggcagaaggccggttgggcgcagcgttagcaccagggtagaaaccagaatactggatggctcaaagaagccacgaatacgatcaacaatgctcgccgcttcgccacaggtgatgctcacttcatcgccgttgctcatatccaccagaatctcgcggcgctcgcccggtgccaggctaagttgcttcacgcttacaggagcaggcaggaatccctgatcgccagaaatcacatgtaacgggcgaccatcgttcatctgtagttgatagcgacgagagttgctcgcgttcagcagtcgcaagcgcacccagccacggctgacttcaacgtacgggctttgtacaccgttaaccagcagcgtatcaccaacaaagccgccgcttcccggttcgttgtattctggcgtaccaaagttatccagccgtttatcctggataatgaccggaaaatcatccacaccataatggttggggataggcaggctcttgctgacttcatcttccaccagccacattccggcaaggccgttatagacctgctgagccgtgcggttgggagtattggcgtgataccacagagtagctgcgttctggcgaatgggcagtacgggtgcccagtcagcgtttgggctcatcatccgtgccggaccgcccatcagcgggcctggtacctgtagcccggccaccgtcatactgacattttctgtcaggcggttgctgtaaataagcttaacatcgtcgcccttccagacgcggatagtcggccccaggtaacgaccattgattccccagacgctcgcgcgtgtccctggcgtaaaactccagtgcgcacgttgtacagtcataaacagcggttgcccacggcgagattcaagtagcggcggaacgggtagcggttgctgttgcccggctgcgctggccttcaggggaacagcgcctgcacaaagtgcaatcccgcttgcctgaatgaactgacgccgactgagactcatatttgctccatgtaaaactggctaaagtaataccgtgcaggaaagtgttccccgcaaaaatacagattgccgacttaaacttttccggcggcttcgcgttctgcgacttctttatcgagctcggcgattttttgttccattatgctacgacaatgggcagccagctcacgaacctgatctttgccatactgactgacgtcaattggcggcagcatttcgacaatcaccagaccgttgtgcagtcgattaagattaatcttattgctagttgtagagacgcacacgggaataatcgggacgcccgccgcaattgccgcgtgaaatgctccagtcttgaacggtagcaggccgcgaccacggctgcgggttccttccgggaacatccagatggaaatacggcgttttttgaagtgattcactacttccgcaatggtgccgtgagctttagtgcgattgtttctgtcgatcaataagttgccggttaaccagtacaactgcccgaagaaggggatccacagcaagctctttttacctaccgtcaccgtcggcggttgcacgatgttgcttgctgtcaccatgtcatagttgttctggtggttagcgatatagatagcattgccgtagctttcagcgtctgtaggtttacggcactcaactttcaggccaaacagcggcgcaagacggccaaacatatgcccaaaggtggccacatgtttcgggttacgcgggctgaaaaggcagtaaatggagccgaatacacagactaagatgctgtaaatcacggtaataataagacgaaagatatatagcataacaccctctgaaggtctgagagactggcattgtacgtcacctgaaatcaggttagggcattgttaaaagccgctctctggaaaagcgtattgttaatcgcaacgcatgaataaacaacggtttcaagggaatttttatcgtttccgggggttgaatacgctgccggatgacgacttaacgtttcatccggcgttccttgcaagcgggaggaaacagcgccctccccggcatattactcttcgctatcaccgctgctggcacggcgaggagagtcgatctcaacacgatcgatacgctgcaaaccgcgcatcaacgtaccgcggcgtccacgttcgccagtgactttctgtaactcttccgggcgcagtttaattttgcgtttcccaacatgaatggtcagcgtgctttgcggcggcagaacgtacaattgcgccagaccatcttctccacgcgcggcttctgcgcttggaatgttgataatcttgttgcctttgcccttgctcagctgcggcagatcacttaccgggaacatcaacatacggcctgcctgagtgattgccagcagcatatcggaagcatcttcaatcaccaccggcggcataacatgggcattttccggtaaggtgatcaaagccttacctgcacggttacgcgccaccagatcgttaaaggtgcagacgaaaccgtaacccgcatcggaagccatcagcagtttctgatcgtcgctttccatcagcatatggtcaacggtcgccccaggcggcaacgttaatttgccggtgagcggctcgccctgaccacgcgcgctcggcagcgtaatcgggtcaatggcatagctacgaccggtggaatcaacaaacactaccggttggttgctcttacctttcaccgccgctttgaagctatcacccgctttataattcaggcccggcgcgtcgatatcatggcctttagcgctgcgtacccagcccatctggctcagcacaatggtgacaggttcagacggcagcatgtcgtgctcgctcatcgctttcgcttcttcgcgttcctgcaacgggctacgacgatcgtcaccgtaggcttgcgcgtctgcctgcagttctttcttcagcaggttattcattttacgctcggaagccaaaatgccctgcaactggtcgcgctctttttccagttcactctgctcaccgcgaatcttcatctcttccagtttggcaagatgacgcagtttcagttcgaggatcgcttccgcctgggtttccgtaaggccaaaccggctcatcagcgccggtttcggttcatcttcattacgaatgatctcaatcacttcgtcgatattgagaaacgccaccagcaaaccttcgaggatatgcaggcgcttgaggactttctccagacgatagttcagtcggcggcgcacggtatcgcggcggaacaccagccattcggagaggatttccagcaggtttttcaccgccggacgaccatccagaccgatcatattaaggttaatacgatagctcttttccagatcggtggtagcgaagaggtggttcatcacctgatccatatccacgcggttggaacgcggcacaatcaccaggcgggtcgggttctcgtggtcagattcatcgcgcagatcgtcaaccatcggcagctttttgttgcgcatttgcgcagcaatttgctccagtacgcgcgcaccactaacctgatgcggcaatgcgctgataaccaccgcgccatcttctttcttccacaccgcgcgcatacgcacactaccacgtccgttctcgtagattttacggatctcggcgcggctagtgataatttccgcttcagtcggataatccggcccctgcacgatatccagcagctgatcgagcgtggttttcggctggtcgattaatgcgattgccgcctgagccacttcacgcaggttatgcggtggaatatcggtcgccatgccgacggcaataccggtggtgccgttaagcaaaatgtttggcagacgggcaggtagcattttcggctcctgcaaagtgccgtcgaagtttggcacccagtcagccgtcccctgccccagctcgctcaatagcagctcggaatatttgctcaaccgggattcggtgtaacgcattgccgcgaagcttttcggatcgtccggcgcgccccagttcccctgaccatcaaccagcggataacggtaagagaacggttgcgccatcaggaccatcgcttcataacaggcgctatcgccgtgcggatggtatttacccagtacgtcaccgacggtacgggcgctttttttaaatttggcgctggcattcaggcccagttcagacatcgcatacacaatgcggcgctgaacaggtttcagaccatcaccaataaacggcaacgcacggtccatgatcacgtacatggagtagtttaagtaggcgttttccgtaaattcatgtagcgcaaggcgctctgccatatcgctcattaattctgattcctcaacttattcgccagccttcaaaggggcaatattgccggagatactacattatctgccgcgtcgagtcacaggagatcaacgtgaatagcgccgccggacgtgctccgacggcgataaaggcatcaatgtgccttgatatacaactctttgctgtagacataatcctggggattatgcagcggaaaaccgccaacgtagggtttaagcagtttgattaacggctgatagtagataggaatcagcggtgcctgttggttgatgatcacttctgcctgctgatacaacgcattacgctttgtcgcatcagtgatctgcgtggcctggtttagtaaggcgtcatactgcgcatttttccagtgaccgacgttttcttcactatcgcttttgagcgtgttcaggaagctggaagcatcattgtacgtcgcatcccagctctgccgagacagcatgaaatcaccggctcgtcgggcatcaagataggttttccactccattgtgcgcagcgtcacctgtgcacccagccattttttccattcggaagacaacgctatcgcggtcttttcatgcagatcgtacttgttgtagaacagctcaaagcgtagcggatgagaggcgtcgtatcccgcctgtttcagcaaggcttttgccatcgcgacgcgctcactcattggcttttgcagttcatcgaacgtcgtcgcgctaaagccttttacctctggcggcgtcagcgtggttgcgggcgttctcaaccccagtaccttttgcgcaataagctgtcgatcaaccgtaagatatagcgcccgacgcactcgcacatcgttaaatggcggtttctcaaggttgaagttgtaatattcgctgttcagacgcggaataattcgtagctcgccaggcagacttttttcaatggcgggaatttgctgcgccggaacccaggtgagatcgacctctcccgcgcgatagcggttatagccggtgacgctattatctagcgccagatactcaacctgttgcaatactgtatgttgcgcatcgcggtactttggatttttgcgtgcagtaatcttttcgttaactacccactgatcaagcacaaaggcaccgttgtaaaccatgttctctggcttactccagctatcgccatgtttagcgatgacatgatgaggaaccgggaacagcgtcggccaggcgagcatcgtcgtgaaccaaggaaccggctgctcaagcgtaacttcaagagtacgatcatccgtcgctttgacacccaggcttgtaacatctgctttacccgcaacaatagctgcggcattgttaatgtgcgcctgtgccagatagccagcaaaagggcttgccgttttcgggtcaaccgcgcgctgccagccgaggacaaaatcctctgccgtcagaggctgaccgtcggaccactgcaaaccgctacgcagatggaaaatatagcgcttgccgccgtccagtatctcccagcgttcagcctgagcgggctgcacctggccttcaccgtccatccataccagaccttcaaacagatccagcacaatctgcgcggcagtattctcctccaccttttgcgggtcgagcgtacctgggtcgctatgattgttgtaacgaaagacttgttgcggggcgagcggtgtgttggcgggaacgtcagcagcgtagagaggagccgcacttaccaggctgaccagccataataaatttcgcgtatacatggtattccttaccggagaaattataagcccaacaacaatacgcctgtggcattgttcgctcaaacttatcgcgagtgatttggctcacactccggtaaagaaaaaagcgagttgcccccgcttttccattaattaacggatttcattcaatagttctggatgcttatccagaacacgtaaaagtttgattgtggaaggatgaggttgggcattgcctttttcgtaacggctaaacgcatttacacctcccccaaaaatttcgcttgcctctttttgggtaagagagagcttttttcgaaccttcactataaattcaggtgccactgtttcggcattcacgctagcccgaaatgcctttacttgcgccatgaaagcatcactctcttctttattcatgatgctctcttcgcaatggacacaatataaaccgtggatacctttcaatactgtttttcgtccacggaaggtgtatggaatatctttaatgccagaaaccatttctccctggtggcaaaccggacatttcatattacttctccttaaagctgacgatcagtacgtcatgaattaccgtaattttaagataaacctggcctgtaacaagcctgggtctgtaaacatcctgccagatagtatgatcagagtaggtggtcatgcttttataaaagtcgctctcacttaatccaatgataacattacacataccatcaaaatccaaacctaactcatctgcatttaacagggcactacgtgttgtacgaacttgcccggcattgacaagttttttaacctgactcaaacgtgtatgtggtgtgcgtttttccataacccccgcctccctgttactttagttataacctaaaaggttaattacagcaatgaaaaagcacctaaaaggttagttagatgtacggagatagtgaccacacaaaacgtattctttaaggaaagtgattgaccatataagaaagtggcgcattagtagcgccagtttgaagcaggaatttataagggaagctggagtcaggcatcacgccaacggcacataaacatccgtttccagtcgctgctctgtcaccccttcggcaagattggtgtagtgaaacagaatcggtgctttacgcattttctcgccgcttgcaggcagccagtggcgaatgatgccccataccgtgtgactaatatcgtccagctcgccaacgtggcgggccacggcataacgtccaccggtaagttcaccattgctcacaccataacgattatcgggaatcggttcgctaacgctgccgcagatatcaaagcgaaacgcttccggtgcggtggtggcagggtcgtcccaggcgacgccaaaagtctggctttggttaacaggagaaagccccgtctctttacgccacatgataaatttcgccacgctgtagttgagcaattcagggctacagcggtgcggcaacatcgccacaggtatacttgggaaatcgataatgtttacatccagtgtcaggtttgtcattttgcctccctgcgaaattattcccgggaacgcgtcccgggagcggtaacaattacggatttactttgcggatctgtttgacgtcaatttcaacagaattccagtctttatcgacttcaccctgaatctcaaccgtatctttcggcgtcaccgtcacgccgttccagcgtttgtggtcgatatcaacattgatagtaccgctggcatctttgaacacgtagagatcgtcagagatgcgttcaacgatattgccgcgcagggttacccaggtgtcgtcacgcagggattttgcgctttctacagtcgttacgctgccgttcggcccctggaatcctccggcctgactttgcgttgcgcttgggccagaaaaaccgccctgctctgctgccatcaccggtgcgctgcacagggccattactgcgattactgctgcgaattttttcatgtttattactccctttaatgtctgtttccgagcatttaacaagatagtccttaacaacttcttaagggaaaaaaataaaatttagtgctgtacagagcgcgttacaacacggtttactggcagcaaatacggttatcgcagggatgaaaaaatgcgaattttactgatagaagatgacatgctgattggcgacggcatcaaaacgggccttagtaaaatgggttttagcgtcgactggtttacacaaggtcgtcagggaaaagaggcgctttatagcgcaccttatgatgcggtgatcctggatttaaccttaccaggcatggatggtcgcgatattttgcgcgaatggcgagaaaaaggtcagcgtgagccggtactgatcctgaccgcgcgcgatgcgctggcggaacgtgtagaagggctgcgtctgggagctgacgattatctgtgtaaaccttttgcgttgatagaagtcgccgccaggctggaagctctgatgcgccgaaccaacggccaggccagcaacgagctgcgccacggtaacgtcatgctcgaccccggcaaacgtatcgccacgctggctggcgaacccttaacactgaaaccaaaagaatttgccctgctggaattactgatgcgtaacgctggtcgggtactgagccgcaaactgattgaagagaaactgtatacctgggacgaagaggtcaccagtaatgccgttgaagtgcatgtgcatcatctgcgacgcaaactcggtagtgattttattcgtaccgtgcatggtattggttacacattaggtgagaaatgaaatttacccaacgtcttagtctgcgcgtcaggctgacgctaatctttttaattctggccagcgtgacctggctgctttccagctttgtcgcctggaaacaaacaacggataacgtcgatgaattgttcgacacccaactgatgctgtttgccaagcggttaagtacgctcgatctcaacgaaatcaacgcggcggatcgcatggcacagacgccaaatagattaaaacacggtcatgttgatgacgatgcgctgacctttgccatctttacccacgacggcagaatggtccttaatgatggcgataacggagaagatattccctatagctatcaacgggaaggttttgctgacgggcaactggtcggtgaagacgatccttggcgttttgtctggatgaccagtcctgatggcaaatatcgcatcgttgttggccaggaatgggaataccgtgaagacatggcgctggcgattgttgccgggcaattgatcccgtggctggtcgcactgccgattatgttaatcatcatgatggtactactgggtcgtgaactcgcgccgctgaacaaactggcgctggcactacgtatgcgtgaccctgacagcgaaaaaccactaaacgcgactggcgtacccagcgaagtgcggccactggttgagagcctaaatcaactgttcgcccgcacacatgcgatgatggttcgtgaacgacgctttacctccgacgcagctcacgaacttcgtagcccgttaacggcgctgaaagtgcaaaccgaagttgcgcagctctctgacgatgatccgcaggcgcggaaaaaagcactgctccaattacattccgggatcgatcgcgctactcgtctggttgatcaactgctcacgctaagccggctggacagtctggataaccttcaggacgtcgcggagatcccgcttgaagatctcctgcaaagcagcgtgatggatatttaccacacggcgcagcaggcgaaaattgacgtgcgactgacactcaatgcccacagcatcaaacgcaccgggcaaccgctattgctaagtttgttggtgcgaaatttgctggataacgccgtgcgctacagtccacagggcagcgtggtagacgtcacgctgaatgctgataatttcatcgtgagggataacggccccggtgtgacaccagaggcactggcgcgaattggcgaacgcttctatcgcccacccggacaaaccgctaccggcagcgggcttgggctaagcattgtccagcgaatcgccaaattgcatggcatgaatgttgaatttgggaatgcggaacaaggtggatttgaggcgaaggtaagctggtaacttctctgtctatgagagccgttaaaacgactctcatagattttattaatagcaaaatataaaccgtccccaaaaaagccaccaaccacaaaccagacaaataccgaggctgaatacatatacccaaaactcgaacatttcccgcataaagagttttcttaagataagaataataagtggcgtaagaagaaaaaatgctgcaatcattgcttgcaatatacgatcttcgccactaacggaaggtatactgcaaatatttcctccgctctcaagcatccagtcatacttattgaaagcaaaaaaagaatctattaaccaataagtaagcattatatatagcaatgcttcaaatattgttttaattttctgctttaacatatatcagtacgctcataaaaatccatttataattatcaacatgacacgttgatactttcatcttttacttattcaaagccatattttcaatccccaaaaaaaccgaaccaaacgtgtaaattattccggtgcgagtaagaattatgaggaatggctatcagtattgtcattttcagaaaatatttatcctgcatcggtgagtcagagtaagatcagacttttgctaaattcgcaaaagactttgcacattttgctaatttcaccgtaccgctctgtgacgtactatagtcggcaaacgtctcaccttgaggttaaaaaatgagcaacatcctgattatcaacggcgcgaaaaaattcgcccactccaatggtcaactgaacgacaccctgaccgaagtcgcggatggcacactgcgcgaccttgggcatgatgtccgcatcgttcgcgccgacagcgactacgatgtcaaagcggaagtacaaaactttctctgggctgatgtggtgatctggcagatgccaggctggtggatgggcgcgccgtggacagtgaaaaaatacattgatgatgtattcaccgaaggtcacgggacgctgtatgccagcgatggtcgtacccgcaaagatccgagcaaaaaatacggttccggcggcctggtacagggcaaaaaatatatgctttctctgacctggaacgcaccaatggaagccttcaccgaaaaagatcagttcttccacggcgttggcgttgacggtgtgtatctgccgttccataaagcaaaccaattcctcggtatggaaccgctgccgacatttatcgctaatgacgtgataaaaatgcctgatgttccccgctatactgaagaatatcgcaagcatcttgtggaaatttttggttaactagagctcaggctttagaaggagttaaccatgcttaccgtaatcgcagaaatccgtactcgtcctggtcaacatcaccgtcaggcggtattggatcagtttgctaaaatcgttccaaccgtactgaaagaagaaggttgccacggctatgcgccaatggtggattgcgcagctggcgtgagtttccagtctatggcaccggattctatcgtgatgattgagcagtgggaaagcatcgcgcatcttgaagcgcatctgcaaaccccgcacatgaaggcgtatagcgaagccgtaaaaggtgacgtgctggagatgaatatccgtattctgcagccagggatttaatcctgccttgtttgcccggccatcctgaccgggcaatgttctttcctttaaacctcaatctccgccatgtcgcctttctcttgcaaccagttgcggcgatcttcgctgcgtttcttcgccagcagcatatccatcatcgcgtcagtacgctgatcgtcttcatcatcgatagtcaactgcaccagacggcgagtgttcggatcaagcgtggtttcgcgcaattgcatcgggttcatttcccccagacctttaaaacgctggacgttcggcttgcctttcttgcgttttaattgctcaagtacgccctctttctcttcttccgtcagcgcgtaataaacctctttcccgagatcaatacggtagagcggtggcagtgcgacgtaaacgtgaccgtgtttcaccaacgcgcggaaatgttttacgaacaaagcgcagagcagcgtggcaatgtgcagaccatcagagtccgcatccgcgaggatacagattttgccataacgaagctggctcagatcgtcgctgtcaggatcgataccgatcgctacgctaatatcgtgcacttcctggctagccagcacttcgtcggaagagacttcccaggtgttaaggatcttacctttcagtggcatgatcgcctgatattcgcgatcgcgcgcctgcttggcagatccgcctgcggagtcaccttccacaaggaacagctcggtacggttaaggtcctgcgcggtacaatcagccagtttgccaggcaacgccgggccgctggtcagctttttacgcaccacttttttggccgcacgcatacggcgctgggcgctggaaatcgccatctccgccagcagttcagccgcctgaacgttctggttcagccacaggataaaggcatctttcaccacgccagaaacgaatgccgcgcattgacggctagagagacgctctttcgtctgcccggcaaactgcggatcctgcatttttacactcagcacataggcgcagcgatcccagatatcttccgcgctcagctttacaccgcgcggcagaatattgcggtattcacagaactcacgcatcgcgtccaacaggccctgacgcagaccattaacatgggtaccgccctgcatcgttgggataaggttgacgtagctttcggtcagcagttcaccgccttccggcagccacagtagcgcccagtccacagcttcagtatcaccagcgaaattaccgataaacggtttttccggcagcgtcggcagaccatttaccgcttccgccaggtaatcattcagaccgtcctgatagcaccagcgttgttcggtattgttgatctcatctttaaaagtgatctcaacgccagggcacaataccgctttggctttcagcacatgcgtcaggcgactaacagaaaatcgcgggctgtcaaagaaggtttcatccggccagaagtgcacactggtaccagtattgcgtttaccgcaagtgccgacaacctgtaaatcctgcaccttttcgccattttcaaaggcgatgttataaacctgaccatcgcggcgcacgttaacttctacgcgcttgctcagggcgttaaccacgctaatccccacgccatgcaggccgccagagaactggtaatttttgttagagaatttaccgcctgcatgcagacggcaaagaatcagttcaaccgccggtacaccctcttccgggtgaatatccaccggcatcccgcgcccatcgtcaataacttctaagctctggtcagcatgtaaaataacgtccacgcgttttgcgtgacccgccagtgcttcatccacactgttatcaatgacttcttgccccaaatggttagggcgagtggtatcggtatacatccccggacggcggcgaaccggctcaagcccggtgagtacctcaatggcatcagcgttataagtttgcgtcatggtttaagttagtaattcgagttgatcgtcagagatggtgcagaccaagaaaatcgacgatcgggttgaaataatcttcgaagcccgtgaatgcgtggttgccgccttctatgacagtctggcggcaggaagcgtagtacgccaccgcctggcggtaatccagcacttcatctcccgtctgttgcagcagccagatcaaatccggcgcttccagcgggtcaatctgcatgactttaagatcgtaaatatggcgactctctagcacatattgctgcccggtgtaggggttctcgttctgaccgagatagtccgtcagcagttcaaacgggcgcaccgccgggtttaccaccactgcgggcagcataaaacattgactcaaccaggtggcgtaatatccccccagactgctaccgacaatacccaggctatcaccgccatgttccaggacaatggattccagcagctctgccgcgtcggaaggatacggcggcaactgcggaatgatcatctcaacgtcagggtgatgttccgccagccagttttttaacaagctcgcttttgcagagcgcgggctgctgttgaaaccgtgtaaataaagaagcgtagacatcagtagccttcactagcggtatcaggttggaaacgtgtgtccgccaggcgatgcacctcggtggtcagcgtgccatcagcatgtaactcgagagtacgccagccgggcgcgatggtatccagcgtaaagttggaacagtgcggcttaaactgcacacaggtgctcggcgttgccagcaggcggcgaccattccagtcgagatccagctcctgatgaatatgaccgcacagcaagtatttgacgtgcggaaacttcgccagcacggtatccagttcgcccgcgttacgcagactgtgttgatcgagccaactacaacccgcaggtagcggatgatgatgcagcagcagcaacgtatggcgttctggcgcatcggccagtttacgttccagccactcaagctgaaactcgctcagctcaccgtgcggcacgccaaacacctggctatccagcaacaggatttgccattgctcaccaataaacacgcgcttcgccggggagatacccgcatcctgtaacgcgctgtacatcgcgggctggaaatcgtggttgcccggcagccagacgcagggcgcacgaaaacttgcgatgccttcagcgaaatgctgataggccgcagaggattgatcctgcgctaaatcacctgtcgcgacaatcaggtcgaattcgtgctggtgtggccgaatcgcctccagcaccgcctggtaactctcccaggtgtttacccctaacagggcttcgtgcttttgtgcaaacaggtgagtgtcggtaatttgtaaaatcctgactctggcctcaccagccagaggaagggttaacaggctttccaaatggtgtccttaggtttcacgacgttaataaaccggaatcgccatcgctccatgtgctaaacagtatcgcaaccagtccgctaaaaactgattaatttgatgcttttcgtcgcgttgatgcaactttttattaggataatcataccgcgctttgaagcgaaaaatctgctggctactacacacttcagccaccatcgcgtcatgatacagacgcaccgtcatactcggaaggctccagtaactgatcgcgggcgcagtctgttctattgtcaccagggtagtgtatcgggtgctttccacaatcgtcagccgatattgtgcgtttgccacctgatagcttacagtttcgccgggtgcgtcattgcgcggtaacaaacggcgcaattgactaaagttcatctcgcacaggcgcatcatttcaggaaagtcaggtgtgtaacgcttcatttatgcccactcattttttaacgcttgatgatgcagctgcagccattgcaaagcgatgacgctcgctgcgttgtcgattttcccctcttctacccactggtatgcctgttcccggcttaccacatgaacgcgaatatcttcgttttcatcagccagaccgtgaataccgcttgcggtcgtggcgtccacttcgcccaccataatactgctacgctcactggtgccccccgggcttgccaggaaacttaacaccggtttggtccgtttgactatcagtcccgcctcttcaatcgcttcgcgacgggcaacatcttccacactttcaccctcttcaatcatcccggcaaccatctccagtagccaaggggtttcgctggtgtcgtacgcggcaatccgaatctgctcaatcagcacaacttcatcacgcactgggtcaaagggtagcaagactgcggcgtgaccgcgctcaaaaatttcccgccgcacctcatgactcatttgcccgttgaatagacgatgacgaaatctataaagatctaaactaaaaaagccgcgataaagtgtttctcgtgcaataatttctacatcgtttttgccaaatgtaacgggcaggttgtctggcttaagcattgttaatgtcctggcactaatagtgaattaaatgtgaatttcagcgacgtttgactgccgtttgagcagtcatgtgttaaattgaggcacattaacgccctatggcacgtaacgccaaccttttgcggtagcggcttctgctagaatccgcaataattttacagtttgatcgcgctaaatactgcttcaccacaaggaatgcaaatgaagaaattgctccccattcttatcggcctgagcctttctgggttcagtagcttgagccaggccgagaacctgatgcaagtttatcagcaagcacgccttagtaacccggaattgcgtaagtctgccgccgatcgtgatgctgcctttgaaaaaattaatgaagcgcgcagtccattactgccacagctaggtttaggtgcagattacacctatagcaacggctaccgcgacgcgaacggcatcaactctaacgcgaccagtgcgtccttgcagttaactcaatccatttttgatatgagcaaatggcgtgcgttaacgctgcaggaaaaagcagcagggattcaggacgtcacgtatcagaccgatcagcaaaccttgatcctcaacaccgcgaccgcttatttcaacgtgttgaatgctattgacgttctttcctatacacaggcacaaaaagaagcgatctaccgtcaattagatcaaaccacccaacgttttaacgtgggcctggtagcgatcaccgacgtgcagaacgcccgcgcacagtacgataccgtgctggcgaacgaagtgaccgcacgtaataaccttgataacgcggtagagcagctgcgccagatcaccggtaactactatccggaactggctgcgctgaatgtcgaaaactttaaaaccgacaaaccacagccggttaacgcgctgctgaaagaagccgaaaaacgcaacctgagcctgttacaggcacgcttgagccaggacctggcgcgcgagcaaattcgccaggcgcaggatggtcacttaccgactctggatttaacggcttctaccgggatttctgacacctcttatagcggtagcaaaacccgtggtgccgctggtacccagtatgacgatagcaatatgggccagaacaaagttggcctgagcttcagcctgccgatttatcagggcggaatggttaacagccaggtgaaacaggcacagtacaactttgtcggtgccagcgagcaactggaaagtgcccatcgtagcgtcgtgcagaccgtgcgttcctccttcaacaacattaatgcatctatcagtagcattaacgcctacaaacaagccgtagtttccgctcaaagcagtttagacgcgatggaagcgggctacagcgtcggtacgcgtaccattgttgatgtgttggatgcgaccaccacgttgtacaacgccaagcaagagctggcgaatgcgcgttataactacctgattaatcagctgaatattaagagtgctctgggtacgttgaacgagcaggatctgctggcactgaacaatgcgctgagcaaaccggtttccactaatccggaaaacgttgcaccgcaaacgccggaacagaatgctattgctgatggttatgcgcctgatagcccggcaccagtcgttcagcaaacatccgcacgcactaccaccagtaacggtcataaccctttccgtaactgatgacgacgacggggcttcggccccgtctgaacgtaaggcaacgtaaagatacgggttatctgccgcattcttcccccttcagccttcaatttcgaccagccatcctctattctgatgggtatttaccactggtcccggaagacaaaaatgaaacggacaaaatccatacgccacgcatcgttccgcaaaaactggagcgcacgccatctgacaccagtcgctctcgcggttgccactgtttttatgctggctggctgtgaaaagagtgatgaaacagtgtctctctatcaaaatgctgacgactgtagtgctgcaaacccaggcaaaagcgccgaatgtaccaccgcgtacaacaatgcgctgaaagaagccgaacgtactgcgccgaaatacgccacccgtgaagactgtgttgctgaatttggtgaaggtcagtgccagcaggcaccagcccaggctggcatggcaccagaaaaccaggcgcaggcccagcaatccagcgggagtttctggatgccgctgatggccggttacatgatggggcgtctgatgggcggcggcgcgggatttgcacagcagccgctgttctccagcaaaaacccagccagtccggcttacggtaaatataccgacgcgacgggtaaaaactatggcgcagcccagccaggccgcaccatgaccgtaccgaagacggcaatggcaccaaaaccggcgaccaccactaccgttacccgtggcggttttggtgaatctgttgccaaacaaagcactatgcagcgtagtgcaaccggtacctcttctcgtagtatgggtggctgataccgatggaaagagtcagtattaccgagcgcccggactggcgtgagaaagcccacgaatacggtttcaattttcacaccatgtacggcgagccgtactggtgtgaagatgcttactacaagttgaccctcgcccaggttgaaaagctggaagaagtcaccgccgaactgcaccagatgtgcctgaaagtggtggaaaaagtgatcgccagcgatgagctgatgaccaaattccgcattccaaaacacacctggagttttgtgcgccagagttggctgacgcaccagccaagcctttatagccgtcttgatctggcgtgggatggcactggtgaacctaaacttctggaaaataacgccgatacgccaacgagtctatacgaggcggcgttctttcagtggatctggctggaagatcagcttaacgccggtaacttgccggagggcagcgaccagtttaacagtctgcaagaaaaactgatcgatcgcttcgttgagctgcgtgaacagtatggcttccagttgctgcatctcacctgctgtcgcgacacggtggaagatcgcggaaccattcagtatttgcaggactgcgcaacggaagctgaaattgctactgagttcctctacatcgatgatatcgggttaggtgaaaaaggtcagttcacggatttacaggatcaggtaatttccaacctgttcaaactgtatccgtgggaatttatgttgcgtgagatgttcagtaccaagctggaggatgcaggcgtacgctggctggaaccggcgtggaagagcattatctccaacaaggcacttctaccgctactgtgggagatgttcccgaatcacccgaacctgctgcccgcttattttgcggaagatgatcatccgcaaatggaaaaatatgtggttaaaccgatcttctcccgtgaaggcgcaaacgtgagcatcattgagaacggcaaaaccattgaagcagcggaaggtccgtatggcgaagaagggatgattgttcagcaattccacccgttaccgaaattcggcgacagctatatgctgattggtagctggctggtgaacgatcaacccgccggaattggcattcgtgaagaccgtgcattgatcacccaggatatgtctcggttttatccacatatttttgttgaataagccacgataccggatggcactcgccatccggtaattgttagcctatctgcacgctcagcatactcaggctgcccatttctataccctcaaccggaatggtaattggctcctgcccatcccacgcacctaacacatacaacaacggcaaataatgctctggcgttgggttgcttaacgtgccaccttcatggtcgaggtaattcaccagaggatgttgttccactggcccttgccacgtcagattcgctttcacatactcattaaagctcgtcgcccacggatacggactactatcaccgtgccacttcactgtgcgcaggttatgcaccacgttaccgctggcgaccaacattattccttcatctcgcagcgctgccagtttgcgccccatttcgaaatgccaggcggcaggtttgctactgtcgatactcaactgcaccatcgggatatcagcgtcaggatacatcttaatcagcacgccccagctgccgtggtcaaagccccaggcttctttatccagcgtcaccgggatcggcgctaacagctcaaccagacgctgtgccagcgcagggctacccggagcaggataatgcgtatcgtacagcgcctgcgggaagccaccaaagtcatgaatcgtgggcggcgtctccatcgcggtcactcctgttccacgggtaaaccagtgagcgctaaccaccacaatcgcttgcgggcgtggcaatgtcatccccaacttctgccagctgcgggtatacaaattatcttccagcacgttcatcggactaccgtgacctaaaaacaatgctggcatacgtgtactagacatgatgatatccttaactaaaggtgtcattttgatatcctcacaatacgcttgttcggcggagtaagaacccggataacaatgatgatgatcatcagttattttgacgatctgcctgaaggtgaagatttataaggagttgtcgatgagtgtacctctcattctgaccatactggcgggggcagccacgtttattggcgcgtttctcggcgttctcgggcaaaaacccagcaaccgcttactggcgtttagcctaggttttgcggcggggatcatgttgctcatcagtttaatggaaatgcttcctgccgcactagcagctgaaggaatgagccctgtgttgggttatggaatgtttatcttcggtctgcttggctattttggcctggaccgcatgttgccacatgctcatccgcaggatttaatgcaaaaaagcgtgcagccgttgccaaaaagcatcaagcgcacagccattctgctcactctcggcatcagtctgcataacttcccggaagggattgccacctttgtcacggcgagcagcaacctggagctgggatttggcatcgcactggccgtcgcgttgcacaatatccctgaaggtctggcagtggcaggcccggtttatgcggcaacggggtctaaacgcaccgcgattctgtgggcggggatttctggactagcagaaattcttggtggtgtgctggcgtggttaatcctcggtagcatgatttccccggtggtcatggcggcaatcatggcggcggttgcaggaattatggtggcgctcagcgttgatgaattaatgccgctcgccaaagagattgaccctaataataaccccagctatggcgtactatgtggaatgagtgtgatgggattcagtttagtgctgctacaaacggcgggaattggttaaaaacaacatcagaagttgtccagcgcatggacaacttctgccagcttcacgaaagccttattctaccttttcggctgtctcttctctcgtactgtttaagtatttgttccgcgcttcaagcagtgcgtctctgtcctggcgaaacgcccgacaataacgtttcaaatgcaggaaataacccaccacaaccagagcaatcaatacaatccagtaccaggcgataaacatccttttacccttaatatttaacaatactaaacatttagcgtataaatttcacatatcctttttcggatatattcatatggtcgcataataacggaacaattatatgattttgatcataatgaaaaagaatgcctgatattaatgaaattttctcatagaaagagaagcggaattaacatcttgcatagcagggaaaaataaaaaccgaagcctgctacaacttcggtttcttgattaaggcagtaaattaagcagcggttttcagctggctttacgctcatgtgcctgacggtatgccaccaggtcttcaatagtcacgagcgccatattgtgtttattggcaaactcaatacactctggtgcacgcgccatcgtgccatcgtcattagtcagctcacacagtacaccagccggtttaaagcctgccagcgtcatcagatcaatagttgcttcagtatgaccgccacgcgtcagtacaccacctgcctgagcgcgaagtgggaaaacgtggccaggacgattcagatcactcggttttgcgccatcggcaatcgctgcgcgaacggtcgtaatacggtcagcggcagaaacaccggtagtcacaccttcagctgcttcaatggtcacggtaaaaccggtgccataggcgctggtgttattttctaccatcattggcagatcgagttgtttacggcgatcttcagtaatgcacaggcaaacaataccgctaccgtggcgaatggtcagcgccatctgctcaacagtcatggtttctgccgggaagatcatatcaccttcgttttcacggtcttcatcatcaagcaccattacaccgcgtccttcacgcagcgcagccagtgcattttcaacacgttcgaaaggcgtaccaaaagaggaaagtagcgtctgattcatggtaaaaaaacctcactaaaattatggttaccagaatcagggcagtcttaggagtggcggcatatagccaaaataacgtgagcgggtccatgcccgacagaatcgttactctctcccatccggactctaaccgtcggccccggaattacaccggatctgctgtcctttgagttcgcacccaaagcgctcgcgggctttcaactgagttgatttaccgccggtggggaatttcgccccgccctgagaataagcggattcactataacgctaatgattagcggcagcaacgcatagcttcacataattctggtttatatctaatacaaacactaaaacgggccatcaggcccgttatatcagtgctctaactccagctctcttgcctgcatcatctgttgacaataccaggcataacgtgcgcaaaaccaggttctatgttcttcatccatgttaccagtaacggccagaatatcgaccgggcgaccttctgcgtgcattctggcaaaactacgcgccaggaaatcgaaattatttaaagaattaagactatgatccataagcacatcctccggttatcgcataccttttaaggccatatgctttttctgatttcagtattccccaatcagtgtagtgcctttaaacataacgtgcgtaaatatattgtccccgatcacactttttagtgaaaaataaaaaaccatattaaaagactttctcttccagaacttctctaacctgtgttattattaacacagataaatgtaagcaaggaaactattacaaagtaaatattgcgtcactaaatggacattggagtgatatatgattttattcgccgactataacaccccttatcttttcgctatttcctttgtactgttgatcggcctgttagaaatttttgcgcttatctgcggtcacatgctctccggtgctcttgatgcacatcttgaccattatgattctataaccacaggtcatattagccaggcacttcattatctcaatattggaagattgccagctctcgtcgttctctgcttactggctggtttttttggtcttattggcatcctgttgcagcatgcctgcatcatggtctggcaaagtccactgagcaacctgttcgtggttcctgtcagtttactgtttacgattattgcggtgcattataccggtaaaatagttgcgccctggattccacgcgaccatagtagtgctattacagaagaagaatatattggtagcatggcgttaattaccggtcatcaagccactagtggtaatccctgcgaaggaaaactcaccgatcaatttggccaaatacattatttactactggagcctgaagaaggaaaaattttcactaaaggagacaaagtgttaattatttgccgactttctgcaacgcgatatttggcggaaaataatccctggccccaaatattgtaatttattaatcaaaaggaaatttaataatggatgatattgttaattctgtgccctcctggatgtttaccgcaattattgccgtatgcattctgtttattattggaattattttcgccaggctctatcgtcgcgctagcgcagagcaagcttttgttcgtactggtttaggtgggcaaaaagtggtaatgagcggtggcgcaatcgtgatgccgatctttcatgaaataatccccatcaatatgaatactctgaagctggaagtcagccgcagtaccattgatagcctgattacgaaagatcgtatgcgcgtcgatgtagtagtcgctttctttgtgcgggtaaaacctagtgtagaagggattgccaccgctgcccagacgctggggcaacgcaccctgagccctgaagacttacgtatgttggttgaagataaatttgtcgatgccctccgtgcaacagctgcgcaaatgaccatgcatgagttacaggatacccgcgagaactttgtgcagggggtgcaaaatacagtggcagaagacctgagcaaaaacggtctggaactggagagcgttagtcttaccaactttaaccagaccagcaaagaacatttcaatccgaacaatgcctttgacgccgaaggtttaaccaaactgactcaggaaacagagcgccgtcgccgcgaacgtaacgaagttgaacaggatgtagaagttgcggtgcgtgaaaaaaatcgcgatgcgctaagccgcaagctggagattgaacagcaagaagcgtttatgacgcttgagcaggagcagcaggttaaaacccgtactgccgaacagaatgcacgtattgcggcttttgaagctgaacgtcgtcgtgaagcagagcagacacgaattctggctgaacgacagattcaggaaacagaaatcgaccgcgaacaggccgtccgcagtagaaaggttgaagctgaacgtgaagttcgcattaaagagatcgaacagcagcaggtcaccgaaatcgctaaccagacgaaaagcatcgctattgccgccaaaagcgaacaacagtcccaggcagaagcgcgtgctaatctcgcacttgcagaagcggtaagcgcccaacaaaacgtagaaaccactcgccagactgccgaagccgatcgtgctaaacaagttgccctaatcgctgccgcgcaggatgcagaaaccaaagcggttgaactgaccgtgcgggcgaaagcagaaaaagaagccgcagagatgcaggcggcggctatcgttgagttagccgaagctacacgtaaaaagggtctggcggaagcagaagcacaacgtgcgctgaacgatgctatcaacgtactttctgatgaacaaaccagccttaaattcaaactggccttgttgcaggcgctgcctgcggtaatagagaaatccgttgagccgatgaagagtatcgacggtatcaagattattcaggtcgatggtctgaatcgtggcggcgctgcgggtgatgcaaacacgggtaatgtggggggcggaaacctggcggaacaagcattaagtgccgctctctcttaccgcacacaggcaccgctgattgactccttgctcaatgaaattggcgttagtggcggcagtctggcggcattgactagtcccttaaccagtacaactcccgtcgaagaaaaagcagagtaaaccctcttccaggaataatccctggcccaaaaagccggggattttttatatctgcgttccgctaaaaagtgcaaatgatcaggttgttgcagcattttgcgtgacggctcggggaaggcaaaactgcatcagagaaagcattgcgtggggtctggcgctcatcaacaatcggggagtcagcagggggctgaaacgggaaagcccctcccgaagaagggggccttacagaaggaaagggttatgatgaagctcgtcatcatactgattgtgttgttactcgtaagtttcgcagcttattaacagccaatcagaggggggagaaatcctccctcacccttgttcctttactttaggttgaaaaaaaatcagcgtcaagaaggtttcattaacacatatccctggcccaaaaagccggggattttttatatctgcgttccgctaaaaggtgcaaatgctcaggacgttgcagcgttttgcgtgaccgctcggggaaggcaaaattgcctctgggaaagcattgcgcggggtccggcgctcatcaacaatcggggggcagcaaggggctgaaacgggaaagcccctcccgaagaaggggccttgtataaggaaagggttatgatgaagctcgtcatcatactggttgtgttgttactgttaagtttcccgacttactaacaactcatcagaggggggagaaatcctcccttacccttgttcctttactctaggttgaaaaaacaacagcgtcaataggcctgccatgtacgaagcgagatctgtgaaccgctttccggttagccttttttatcctgttggatcttcttgatgatgttggtcgtgctgcaaccgtcttcaaagttgagcaccaacacttcgccaccgttggcccagacttctttactcccggcaatctcttctggtttatagtcgccgcctttcaccagcagatctggcaagatcccggcgatcaagcgctgcggcgtgtcctcttcaaagctcactacccagtcgaccgcttccagtgcgcccagcacaatcatacgctgttcgagtgggtttaccgggcgggaatcccctttcagccgtttggtggaggcatcgctgttgacggcaacaatcaagcggtcacccagcttgcgggcatttgccagataagagacgtgcccggcgtgcaggatgtcaaagacaccgttggtcatcaccactttttcaccacgtttacgcgctgccgctacggccagcttcagttcctcttcggtcatcacgccaaagcctgtatctgcacgtccacgtacagcattttccagctcgatcgggctaaccgtggaggttcccagtttgccgaccaccacgccagccgccgcattggcaaagaagcaggcttcttccaggctattacccgctgccagcgttgccgccaggacgccaatcaccgtgtcgcccgcaccggtaacgtcatacacttcctgcgcttgggttggcatatgcagcggcgctttacccggttgcagcaggctcataccctgttcggaacgggtcactaacagagcgctgagttcgtaatcggcaatcagtttcatgccgcgctcaacaatctcttcttcggtcttacatttaccgacaacagcttcaaattcgctgagattcggcgttaacagcgtagcgccgcggtagcgctcaaaatcggtaccttttggatcaatcagcaccggaacacccgctttacgcgccagttggatcatctgctgtacgcttgccagcgcacctttggcgtagtcagaaagcaccagcgcgccaatgctactcagcgcctgattaatccgctcgtgcagcggctgcggatcaacaccttcgaaaccttcttcaaaatccagacggatcagctgttggttgcgggaaagtacccgtaatttggtaatggtcggatgcgtcggtacagaaacgaagtcgcatttgacgttgacgtcggccagagatttactcagcgcgcgcgctgcatcgtcaatgcccgtcaacccgaccaggcgtgcattagcaccgagagaagcgatattcatcgccacgttagccgcgccgcccggacgttcttcgatggtattcactttaaccacgggcaccggcgcttccgggctgatacgactggtggggccgtaccagtaacgatccagcatcacatcaccaaccaccatcactcctgcacgttcaaactctggcagcgttactttcattcctgtctcctgagagattcaaaatttgcgcgcgataataccatacttcattcttccaccagccacttctgccagcttgcccgcaccagttcacgctctgcggtgaagcaatcctcgctcacatggcccggcaattcctgtaatgccagatgatgaagttcatcgcgaagcgtagtgtaagcacgggtcagcgccatcgcttcctgctcttccataatgtcgttttgcgccagtagttccagaatacgcacgttgtcactccagcgcgttaacttcggtttttcatgagcgtagcgcaacaccagatattgggtaataaattcgatatcggtaattcccccttcatcagctttgatatcaaagcgatcgcgatgtttattgccgagatgagcgcgcattttctcgcgcatttcccgcacttccgtttgcagagttttaccttcacgcggcagcgtcataatctcgcgacgcactgcgtcaaagtgcgcggtgagctgcggatcgccgtacactacacgcgcacgcaccagcgcctgatgttcccacgtccaggcctcgtttttctgataatcggcaaatgcttctgcggatgtcaccagcattcccgccgccccggacggacgcagtcgagcatccacttcatacaaaatgccggaagaggtacgcgtactgaacagatgcataatgcgttgcgccagacgcagataaaactgccgcccgtcgatttcccgctcaccgtcagtcatcgcatccattgggcaatcatggaggaagataaggtcaagatcggaactgtagcctaactcccagccgcccagcttgccgtagccgaccaccgcaaaaccacgcccttcgcgttcgttcaggtgattcggcttaccgtagcgggcaaccatttgaacccacgcctgctgaacgacggcatctatcatggcttccgccagccaggttaagtgatcgctcactttcatcaccggtagcgtaccggcgatatccgctgcggcgatgcgtaacagctgcgcctgtttgaactgacgcagcgcctcaagctgttgctcttcgtcatcttccggcacgcgcagcaaatactggcgcaactcatcgcggtaggcatcggtcgccgtcggctggtaaagggtgtttggatcgagcaattcatccagcaataatggataacgcgccagctggctggcaatcatcgggctcgcggcacacagagaaatcaaatgtttaagcgccgcggggaattcactgagcaattctaaataggtggtgcgggtaacaatccccaccagcaaggcggtaatgcggctcagcgtaacggcagcgtcttcacgcgcacagacatcacttagcagatgcggcatcagatggtcgagcacctgacgtcctcgcggcccgatggtgcgcttatccagctctttgcggaaatcggcaatcagcgttagcacctgtttgcgatcatcctcgctaagatgcgccagcactggcgtagtgtcatcttcctgcaacgcatcctgccacagctcacgccactgttcgctcaggctctcttcctgagtttcactttcatcgtcgccaatcaattcattaaacacccggcgcacattggtcatatgtgcggtcagcgccccggtcagttgcggccagtcagcaaagtccatcgcccacgccagccgcgcacgattaagctcatcagaaggaagcgtctgggtttgttcgtcgttaatgctttgcagcaggttttccagacgccgcaggaacagatacgccactcgcaattgttcagcatcgttttcagaaagcagatgcagctcggcaatggcgctgagcgttggcagtaaagagcggctttgcaggctcggttcgcgtccgccgcgaatgagctggaacacctgaacgataaattcaatttcgcgaatgccgcctgcgccgagtttgatattgtcggtcaaaccacgtcgacgcacttcacgggcaatcatccctttcatgttgcgcaggctctgaatcacgctgaaatcgatgtaacgacggaaaacaaacgggcgcagcatcgcacgcaactcgttagcatagacgccttcgctatcgcccataatccgcgccttgaccatcgcgtaacgctcccagtcgcgcccctgctcctggtaataatcttccaacgcggcaaagctcagcaccagcgggccactttcgccaaacggacgcagccgcatatccacgcgatagacgaagccatcctgcgttggttgatccagcactttaatcagccgctgccccatgcgggtaaaaaactgcgcgttatccagttcccggcgtccaccctgcgtacaaccatgttccggccaggcaaaaatcagatcgatatcagaggagaaattcagctccccaccgcccagcttacccatgcctaaaatcagcagcggttgcgcttcgccctgcgcattgcacggcgttccccactcgcggcagcaggcgtcatacagccagtcacgcgccgcaacaatcagcgtctccgccagatagctgagctgctgcaatatgctctcttcagtaaccagtgccagcgtttgcgcccaggcgatgcgcaccataatgcgccgccggaatagccgcagctcgcgcattaacccggcttcgtcactcacattacagagcgcctcctgcaaccatgccgcgtaatgctgccattcgtcggcctgcggcggttggctttccagttccgtcagccactctggatgcgcaatcacgctgtcctgcacaaaatcactaaaagtaagtacactcttcgcctgtgcgctaagactttcctcggctaaaggctctggcagccgctcaacaacggtctgccagtactgctgtaacggactagagagcggcttcataagcgattttatccttgcctgattaacgttttccgctgtgcaaccagaacggttcctgattgtttgcctcattacggaaatgttcaatttcgatgcgttgcccggtcgcaatagcgtgatgcagcccctgccagttctccagccaggcttgcgcgacgacaggatcatagtaacccgccagcaacagtatactgtcaatatcacgcgtcaggcgtggcaactggtcacggtagcgatcgcctaacggctggcagaaaacgcttttcagttcagcggcatggcgggaaagatggatatcggcaaagcgtttgaaggagtcgctgattttgccctgcgctttggcatctaaaaatggctgccatgctttgcttaccaaccattcggtcaacgccagcttcgccattgccgtttcggtagagtagaccgccgtcacggcagacaccgcagaagcaatggtcgcctcgcattgagtcagcagatcacgtaagtgagtgctcgctttacgcggcacaataccaccgaacagcatcagcgtatgacggaccaggctaatggctgccagcacctgttctttcgccgcatcgttgccgcgtacccacagttcttcatgatactgccattgcgctaacgccagctcgagcgccgcttccagcccctgttccacatcggcttttgccgcaacatgcaaaatggtggtcggtttgatttcacgcgccggattgccctgcgccagatgatagccacgcgccgctttgctcaggctgccctggcgtaatccggtttggcttaccagttggttcgccagtttcagcaccgcgcgcgtgtcgccgctaagcagttccagttccagctcacagataggttcagcaaattcacccgctttcacttccccctggtcgagggcgatttcaatttggctaccatcgaccgccaccagccatttttcgcgataaaaatcggtgctgaacagcggctgcacgcgggaggcgagatcggcgggcaattcgccgttcggccagacttccgtcggtaactgcgccaggtcgagcgtcggttcgctcaacgccacgttatattccgggcgctgatgtaagccgcctgtcactcttcctgcaactttcatggtcatctcatagcgaccgttttcgccacgaatacgtaagcccatatcgtgcccacgcagccagttatccggcgtttcgtagtaaatattcagcaactgcacggggtcatggtgctcgccgcccagcgtattgagatggtcacgcaacgcctcaacggcactgtgattaacaataaactttaattcgatttcctgagccatggcctttacttatcggttatgtcacataagtgacgatgaacggcgaacttaatgcgatcttttttgtcagtagatagtattttgcgccaaattgccatgcaacgggcaatttgacgggcgtaaaagtttgaagcagtggcaagacctgacacagaggattccgattgatgtcgaatgctttgcgtagcgacactgatgccactactatcgttccactttccatgacaataacgacagcctgatgccaaaattacgcctgatcggattaactttactcgcacttagcgcgactgccgtcagtcacgctgaagaaacgcgctatgtttccgacgaactgaatacctgggtccgcagcggtccgggagatcattatcgcctcgtgggcacggttaacgccggcgaggaagtgaccttattacaaactgacgccaacaccaattatgcccaggtgaaagacagctctggccgtaccgcctggatcccgttgaaacaacttagcactgagccaagcctgcgctcccgtgtgccagatctggaaaatcaggtcaaaaccctgaccgataaactcaccaatatcgataacacctggaatcagcgcaccgcagaaatgcagcaaaaagtggcgcagagcgacagcgtgatcaacgggttaaaagaagaaaatcagaaactgaaaaacgagctgattgtcgcgcagaaaaaggtcgatgccgccagcgtacagctggatgacaaacagcgcaccatcatcatgcaatggtttatgtatggcggtggcgtgctggggcttggcttgctgctcggtctggtactgccgcacctgatcccaagccgcaaacgcaaagatcgctggatgaactaaatcgccttcttcgttgcactgtcttattattaggaattgtgtatttgacgaagggatgatggcgtgaagatttatctggtcggtggtgctgttcgggatgcattgttagggctaccggtcaaagacagagattgggtggtggtcggcagtacgccacaggagatgctcgacgcgggctaccagcaggtaggccgcgattttcctgtgtttctgcatccgcaaacgcatgaagagtatgcgctggcacgtaccgaacggaaatccggttccggttacaccggttttacttgctatgccgcaccggatgtcacgctggaagatgatcttaagcgtcgcgatctgaccattaatgcgctggcccaggacgataacggcgagattatcgacccgtacaacggtctgggcgatctgcaaaatcgtctgttgcgccatgtttcccccgcttttggcgaagatccgttacgcgtattgcgcgtggcgcgttttgctgcgcgttatgcccacctcggttttcgtattgccgatgaaactctggcgttgatgcgcgagatgacccatgcgggtgaactggaacacctgacgcctgaacgggtatggaaagagacggaaagcgccctcaccacccgcaatccacaggtgttcttccaggtactgcgcgattgcggcgcactgcgcgttttattcccggaaattgacgcactgtttggcgttccggcccctgccaagtggcatccggaaatcgatacgggtattcataccttaatgacgctcagtatggcggcgatgctgagtccgcaggtcgatgtccgtttcgcaactttatgccacgatctcggtaaagggctgacgccgccagaactctggccgcgtcatcatggtcatggcccggcgggtgttaagttagtggaacaactatgccagcgtctgcgcgtgccaaatgaaattcgcgatttagccagactggtggctgagtttcacgatctcatccacaccttcccaatgctgaacccaaaaaccatcgtcaaattatttgattccatcgatgcctggcgtaaaccgcagcgtgtcgagcaactggcgctgaccagcgaggctgacgtgcgcggcagaaccggttttgaaagtgcggactacccgcaaggccgctggttgcgcgaagcctgggaagtggcgcagagtgtgccgacaaaagccgtcgttgaagcgggatttaaaggtgtggagattcgcgaggagctgacccgacggcggattgcggcggtagccagctggaaggaacaacgttgcccaaagcctgaatgagtattgggcattttgccggatgcggcgtaaacgccttatccggctacatgtcaacgacagttgtaggcctgataagacgcgcaagcgtcgcatcaggcgttgattgccggatgcggcgtgaacgccttattcggcctacgcaatcgttgacaacgccaagcatccgacactattcctcaattaaaagaacacgacatacaccgcagccgccacaataaagcgataaatggcgaacgggataaagctaatgcgcttaatcaattgcaggaaggttttaatcgctatcagcgccaccacaaaagcggtgataaacccaacggcaaacatcgggatatcgccgcttgtcaggaagccccagcttttgtagagatcgagcgccgttgcgcccatcatcatcggcaccgccagcaggaagctaaactcggaagcagcgtaacggctcacccccatcagcatcccaccactaatggtcgccccggaacgggagaaacccggccacagcgccagacactggaaacagccaatcataaatgcctgacgataggtcatatcatcaagacccggcgcacgcggctctttcggcttcaggcattcggcggcaatcagcaacaaaccgccaacgaccagcgcatacatcacatttatcgggttaaacaaactcttaatcgtgtcgtggaacaacagccccaataccaccgccggaatcatccccagcaaaatgtggatcagcgttaaacgacctttgctttcaccttcgtgctgcaacgggcggccaaagtggatgccaatcaggccaaacagacgccgccagaacatcactactaccgccagaatacttcctaactggatcacaacttcaaaggttttcgccgtgtcgccctcaaaccccaacaagtgaccgacaataatcatatggcccgtgctggataccggcagaaattctgtcaatccttcgaccacacccaatattgccgctatcagcaggctgtgcatatcgctcatcaataaacccctaaattattaaaatgtaccgcttgtccgaactactgcgtatgaccaggttataaccgtttggtttaacagctgtaaaattaattattttctttcagattattgccacgctcaatgattacgccaacattcgccgcccgcgccactgcgcctggcttgctgagtttgatacgcacccacgggctgttgaagcgtgctaacagcagctccgccacctcttcagccacgcgttccaccagcgcaaaacgcgccccctcgacgtggctgaccaccgtttctgcaatgtcagcgtaactgaggcaatccgccacatcatcacttttcgccgctttacggttatcccacgccatttcgatatcgaacactaacttctgttcgatggtctgttcccagtcgtaaacaccaatagtggtgattacgctaagttgctctataaatacaatatccatcacgtcctgcctgctttttggctaaccggataccacttccggcgaaatgtgcgtattatccacagattcatcgttgaacacgaattttcaaaacggaacagcttatgagtgcaatcgcgcctggaatgatcctcatcgcgtacctctgcggctccatttccagtgccattctggtttgccgcttgtgtgggctgcccgatccgcgaaccagcggctccggcaatccaggcgcaaccaatgtgttacgtatcggtggcaagggagcagccgtagcagtactgattttcgacgttctgaaaggaatgttgcccgtctggggcgcgtatgaattaggtgtcagccccttctggctaggcttaattgccatcgccgcctgtcttggacacatctggcccgttttcttcggatttaaaggaggaaaaggcgttgctaccgcttttggtgccatcgcacccattggctgggatctcaccggagtaatggcgggaacctggttactgaccgtgctattgagcggatacagcagcctgggagcgattgtcagtgcactgattgctccgttttatgtctggtggtttaagccacaattcaccttcccggttagcatgctctcttgcctgatcctgctgcgtcatcatgacaacatccaacgtctgtggcgtcgtcaggagacaaaaatctggacgaaattcaaaagaaagcgcgaaaaggatcccgagtgatttctggtggatttacatgacctgatagccttcatcgggcttgcccagccgttgctggcaccatgccgccagaaattccacgcagacacgtaatttcatgctgcgatagagcggctcccggtaaacagcccagatattggcgctttgtgcatactctggcaatacttgcaccagtttgccactctccagaaacggcaacacatcccactcggaacgcagcataatccctttgccctccagcgcccattgcagcacaatctcgccgctattggaggaaagatgcccgcttaccttcacgctttttttctcctgaccgttccccaactcccatattccatgggtcatatcgcgctctttggtcaccagacagtcatgacgacttaattcctgtagggattgtggctgcggatatttttgcagatactcaggtgctgcgcataatattcttttattttttgtcaaaagatgcgcaatataataatcaggaatttcgtcattaatacgaatatccagatcaatattatcctgcactaaatcaatttgccgatcgaacaattcaaaatgcacctgtaactcaggataattgcgcatcagttcggtaatagctggcgcaatatggctgcgcccaaaaccaaaactgcaaccaatacgaatcatcccctccgggcgcgttttgatttgcgtgacgtcatcgaccagtcgctgatattgggtgaggatttccaacgcatgttcgtaacaacgttggccactttcagtcagcgccacgccgcgagcggagcggttcagcagcgttgttgccagcgtattttcaaggatttggatccgcttggtgacaaatgcaggcgtctgcccaagcgtcgccgctgcggcgctaaaactcccgctgtgaacgatttctaccagtacctgcaagtctttggctaaaggccagctattcagcatcgttaattatccgcagttgtgataagcgcagtgtatttcgcaaaacattgccattccctgctctggcgcaatattcattcttattttcgcgttgattcacgaactgttaattacatattcacggtggcaaaaaatataaaaccacatttttagtggtagtttgtggcggtgaatttttccagacaaatacaaaaactggagttgccatgatgagcgaaagtaataagcaacaggcagtgaataagttgacagagattgtcgctaactttaccgccatgatttctacccgaatgcctgatgacgtggtggataaactaaaacagctaaaggatgccgaaacgagcagcatggggaaaattatctaccatacgatgttcgacaacatgcaaaaagcgattgacctgaatcgtcctgcctgtcaggacaccggggagattatgttcttcgttaaagtcggttcccgcttcccactgcttggcgagctgcaaagcatactcaaacaagccgtggaagaggcaaccgtcaaagcgccactacgtcacaatgcggtagaaatttttgacgaagtaaacaccggcaaaaataccggtagcggcgtaccgtgggtcacctgggacatcatccccgacaatgacgatgcggaaatcgaagtttacatggcaggcggcggctgcacgctacctggccgcagcaaagtgttaatgccgagtgaaggctacgaaggcgtggtgaaattcgtcttcgaaaatatctccaccctcgccgtaaacgcctgtccaccggtactggtgggcgtgggcatcgccaccagcgtggaaaccgccgccgtactcagccgtaaagccattttgcgcccgattggcagccgccatcccaatccaaaagcggcagaactggagctacgcctggaagaaggactcaaccgtctggggattggtccacaagggctgaccggcaacagtagtgtgatgggcgtacatatcgaatctgccgcccgccatccgagtaccatcggcgttgctgtctctaccggctgctgggcgcatcgtcgcggcacgctgctggttcatgccgatctcacctttgaaaatctgtctcacacccggagcgcgttatgaaaaagatcctgacaaccccgatcaaagctgaagatctgcaagatattcgcgtcggcgatgtgatctacctgaccggtacgctggtgacctgccgcgacgtttgtcaccgccgtttgatcgaactgaaacgtccgatcccttacgatctcaacggcaaagcgattttccacgctggccccatcgtgcgcaaaaacggcgacaaatgggagatggtctccgtcggcccgacaaccagtatgcgtatggaaagttttgaacgtgaatttattgagcagaccggcgtgaaactggtggttggcaaaggtggtatggggccgctgaccgaagaaggctgccagaaattcaaggcgctacatgtgattttcccggcaggctgcgcggtgctggcggcaacccaggtggaagagattgaagaagtgcactggacagagctcggaatgccggagagtctgtgggtctgccgggtcaaagagttcggcccgctgattgtctctattgatacccacggcaacaacctgatagccgaaaacaaaaagctgttcgccgaacgccgcgatcccatcgtggaagagatctgcgagcacgtccattacatcaaataaccctcccggagaggctcacccctctcctttttcgcaggcataacacgatgaaaccttccactgaatggtggcgatatcttgcgccgctggcggtcatcgccattattgctctacttccggttcccgcagggctggagaaccatacctggctctactttgccgtttttactggcgtgatcgttggactgatcctcgaacccgtgccgggtgccgtggtggcgatggtgggtatatccatcatcgccatactctctccctggctgctgttcagcccggagcagctcgctcagccaggctttaaattcactgcaaaatccctcagctgggccgtttccggtttttctaatagcgttatctggctgattttcgccgcctttatgtttggcacaggctatgaaaaaaccgggcttggacgccgcattgcgctgattctggtgaaaaagatgggacatcgcacgctgtttctcggctatgcggtgatgttctccgagctgatcctcgcacctgtaacaccgtccaacagcgcgcgtggtgcggggattatctatcccatcatccgtaacctgccaccgctctatcaaagtcaaccaaacgacagcagtagccgcagcattggcagctacatcatgtggatggggattgttgccgactgcgtgaccagcgccattttcttgacggcgatggcaccaaacttgctgttaattggactgatgaaaagcgcatctcacgccacgctgagttggggcgactggttcctcgggatgttgccgctcagcattttactggttctgctggttccctggctggcttacgtgctgtacccgccggtactgaagtctggcgatcaggtgccgcgctgggcagagacggaactgcaggcaatgggcccgctctgtagccgtgaaaaacggatgctggggctgatggtaggcgcgctggtgctgtggattttcggcggtgattatatcgatgccgcgatggtcggttacagcgtggtggcactgatgctgcttctgcgcattatcagttgggacgacattgtcagtaataaagcggcgtggaacgttttcttctggctggccagccttatcaccctcgccaccggactcaacaacaccggttttattagctggtttggcaaactgttagcaggcagcttaagcggttatagcccaacgatggtgatggtggcgttgattgtggtgttttatctactgcgctactttttcgccagcgccacggcgtatacctccgctctcgcaccgatgatgattgctgctgcgctggcgatgccggaaatcccgctgccggtgttctgcctgatggttggtgcggcaattggtctggggagcattcttacaccatacgccaccggccccagtccgatttactacggcagtggttatctgccaacggcggattactggcgactgggggcgatttttgggctgatattcctcgtattgctggtgattaccggcttactgtggatgcccgtggtgttgctttaagtgaggacggtgccggaaattgctctccggcacccaatagttttacgcagccggtaactccgccagcggccagcgcggacgcacgctaacgccgagatccgccgtcgcgcctgctttaaaccgcaccattccggcataggcgatcatcgcgccgttatcagtacaaaattccggacgcgcgtagaacacttcgccgcggcgttttttcatcatttcagccagcttcgcccgtaacgtacggttagcactcacgccgcccgccatgaccagtcgcttaaagcccgtctgatccagcgcccgcttgcacttaatcatcagcgtatcgaccaccgcatcttcaaaggcgcgggcgatatcagcacgcgtctggtcgtcggtgccgttgtcacgaatggtatttgccgcgaaggttttcaggccggagaagctgaaatccagccccggacggtcggtcatcggacgcgggaagacaaagcgcccggcagtaccctgagccgccattttgctcagtaacggcccgccaggataatccagccccagcagcttcgcggttttatcaaacgcttccccggcggcatcatcgatagactcgccgagcagctcgtactgaccaatgccagtcacgctgattaactgcgtatgaccgccggaaacaagcagcgcaacaaacggaaattccggcgggttatcttccagcatcggcgctaacagatgcccttccatatggtgtacagggatcgccggaacgtcccaggcaaacgccagagaacgccccacggtcgcgccaaccagtagcgcgccgactaatccagggcctgcggtataggccacagcatcaatgtcttttgccgttaaaccagactcctttagcgccgcctggatcaacggtacggttttacgcacatgatcgcgggaggccagttcaggcacgacgccgccgtagtcagcgtgcaatttcacctgactatacaattggttggctaacaaacctttttcatcgtcgtaaatggcgatgccggtttcatcgcaggaagtttcaatacccagtacacgcatgacttgttttacctcgctttattaccgcgcagtgtaggaccaatgcgggttgatgtaaaactttgttcgcccctggagaaagcctcgtgtatactcctcacccttataaaagtccctttcaaaaaaggccgcggtgctttacaaagcagcagcaattgcagtaaaattccgcaccattttgaaataagctggcgttgatgccagcggcaaaccgaattaatcaaaggtgagaggcacatgccggtaattaaagtacgtgaaaacgagccgttcgacgtagctctgcgtcgcttcaagcgttcctgcgaaaaagcaggtgttctggcggaagttcgtcgtcgtgagttctatgaaaaaccgactaccgaacgtaagcgcgctaaagcttctgcagtgaaacgtcacgcgaagaaactggctcgcgaaaacgcacgccgcactcgtctgtactaattccccgagagcgttgctctccgatcagaccgagttgtagttgtaaggccgtgcttccgaaaggaatgcgcggcttattttcgtttatgaattgctaaaaatcggggcctatggctggacgaatcccacgcgtattcattaatgatctgctggcacgcactgacatcgtcgatctgatcgatgcccgtgtgaagctgaaaaagcagggcaagaatttccacgcgtgttgtccattccacaacgagaaaaccccgtccttcaccgttaacggtgagaaacagttttaccactgctttggatgtggcgcgcacggcaacgcgatcgacttcctgatgaactacgacaagctcgagttcgtcgaaacggtcgaagagctggcagcaatgcacaatcttgaagtgccatttgaagcaggcagcggccccagccagatcgagcgccatcagaggcaaacgctttatcagttgatggacggtctgaatacgttttaccaacaatctttacaacaacctgttgccacgtctgcgcgccagtatctggaaaaacgcggattaagccacgaggttatcgctcgctttgcgattggttttgcgccccccggctgggacaacgtcctgaagcggtttggcggcaatccagaaaatcgccagagtttgattgatgcggggatgttggtcactaacgatcagggacgcagttacgatcgtttccgcgagcgggtgatgttccccattcgcgataaacgcggtcgggtgattggttttggcgggcgcgtgctgggcaacgatacccccaaatacctgaacagcccggaaacagacattttccataaaggccgccagctttacggtctttatgaagcgcagcaggataacgctgaacccaatcgtctgcttgtggtcgaaggctatatggacgtggtggcgctggcgcaatacggcattaattacgccgttgcgagcttaggtacgagtaccaccgccgatcacatacaactgttgttccgcgcgaccaacaatgtcatttgctgttatgacggcgaccgtgcaggccgcgatgccgcctggcgagcgctggaaacggcgctgccttacatgacagacggccgtcagctacgctttatgtttttgcctgatggcgaagaccctgacacgctagtacgaaaagaaggtaaagaagcgtttgaagcgcggatggagcaggcgatgccactctccgcatttctgtttaacagtctgatgccgcaagttgatctgagtacccctgacgggcgcgcacgtttgagtacgctggcactaccattgataagccaagtgccgggcgaaacgctgcgaatatatcttcgtcaggaattaggcaacaaattaggcatacttgatgacagccagcttgaacgattaatgccaaaagcggcagagagcggcgtttctcgccctgttccgcagctaaaacgcacgaccatgcgtatacttatagggttgctggtgcaaaatccagaattagcgacgttggtcccgccgcttgagaatctggatgaaaataagctccctggacttggcttattcagagaactggtcaacacttgtctctcccagccaggtctgaccaccgggcaacttttagagcactatcgtggtacaaataatgctgccacccttgaaaaactgagcatgtgggacgatatagcagataagaatattgctgagcaaaccttcaccgacagtctcaaccatatgtttgatagcctgcttgaactgcgccaggaagagttaatcgctcgtgagcgcacgcatggtttaagcaacgaagaacgcctggagctctggacattaaaccaggagctggcgaaaaagtgatttaacggcttaagtgccgaagagcgatcgggaagcccccgacagccgcactgagaggcagcggcaaatatataagtacgccctcgtaattatcgttggcggtaaacaaccgttggatttcagcgttaacggctgaaggacatcgggtcaatcgcccaacaccaacctcatgaaataagtgtggataccgtcttatggagcaaaacccgcagagtcagctgaaacttcttgtcacccgtggtaaggagcaaggctatctgacctatgccgaggtcaatgaccatctgccggaagatatcgtcgatagtgatcagatcgaagacatcatccaaatgatcaacgacatgggcattcaggtgatggaagaagcaccggatgccgatgatctgatgctggctgaaaacaccgcggacgaagatgctgccgaagccgccgcgcaggtgctttccagcgtggaatctgaaatcgggcgcacgactgacccggtacgcatgtacatgcgtgaaatgggcaccgttgaactgttgacccgcgaaggcgaaattgacatcgctaagcgtattgaagacgggatcaaccaggttcaatgctccgttgctgaatatccggaagcgatcacctatctgctggaacagtacgatcgtgttgaagcagaagaagcgcgtctgtccgatctgatcaccggctttgttgacccgaacgcagaagaagatctggcacctaccgccactcacgtcggttctgagctttcccaggaagatctggacgatgacgaagatgaagacgaagaagatggcgatgacgacagcgccgatgatgacaacagcatcgacccggaactggctcgcgaaaaatttgcggaactacgcgctcagtacgttgtaacgcgtgacaccatcaaagcgaaaggtcgcagtcacgctaccgctcaggaagagatcctgaaactgtctgaagtattcaaacagttccgcctggtgccgaagcagtttgactacctggtcaacagcatgcgcgtcatgatggaccgcgttcgtacgcaagaacgtctgatcatgaagctctgcgttgagcagtgcaaaatgccgaagaaaaacttcattaccctgtttaccggcaacgaaaccagcgatacctggttcaacgcggcaattgcgatgaacaagccgtggagcgaaaaactgcacgatgtctctgaagaagtgcatcgcgccctgcaaaaactgcagcagattgaagaagaaaccggcctgaccatcgagcaggttaaagatatcaaccgtcgtatgtccatcggtgaagcgaaagcccgccgtgcgaagaaagagatggttgaagcgaacttacgtctggttatttctatcgctaagaaatacaccaaccgtggcttgcagttccttgacctgattcaggaaggcaacatcggtctgatgaaagcggttgataaattcgaataccgccgtggttacaagttctccacctacgcaacctggtggatccgtcaggcgatcacccgctctatcgcggatcaggcgcgcaccatccgtattccggtgcatatgattgagaccatcaacaagctcaaccgtatttctcgccagatgctgcaagagatgggccgtgaaccgacgccggaagaactggctgaacgtatgctgatgccggaagacaagatccgcaaagtgctgaagatcgccaaagagccaatctccatggaaacgccgatcggtgatgatgaagatagccatctgggggatttcatcgaggataccaccctcgagctgccgctggattctgcgaccaccgaaagcctgcgtgcggcaacgcacgacgtgctggctggcctgaccgcgcgtgaagcaaaagttctgcgtatgcgtttcggtatcgatatgaacaccgactacacgctggaagaagtgggtaaacagttcgacgttacccgcgaacgtatccgtcagatcgaagcgaaggcgctgcgcaaactgcgtcacccgagccgttctgaagtgctgcgtagcttcctggacgattaatcggtaggccggatcaggcgttacgccgcacccggcactaggccctctgcacaaacgccaccttttcggtggcgttttttatcgcccacgcactaccagcgcctggtccagctcgcgatacgcttcaaccagtttctccagactaacgcgacttaaaccgctgggatttggcagcacccaaatctgcgtgctaccaatggtgagcgtttgtttcccccactgtgcaccgcgctggctgaatccctgttcatatgcttgtttgcccagaatcgccaacgcctgcggctgataatcttcaattttttcaatcagcttacgcccgcctgcgtgtagctcctgcttactaacttcattggcttgcaccgttggacggtctaccagtttggtgacgccacaacgataatccagcagatgctgtgcctcctgcggcttcaactgacggtcggtaaacccggcctgatatatcaccttccagaagcgatttgccggatgagcaaagggaaaaccagtcccggcggaactaagcccagggttgataccgcaaaacacgacccgtaaccctggagccaaaatatcctcaaccatatttactcctttctaacatcaccaggaaaagtataacggattgaaaatacattgtttataaaaacagcaggcgcgcggtaatggctggattgcgacacggagttactttataatccgctaccatggccccttagctcagtggttagagcaggcgactcataatcgcttggtcgctggttcaagtccagcaggggccaccagatatagcaaaggctgacgagaaatcgtcagcctttttctttttatatatcagttactttgcgtgccagtaagccgctgcacgtacccgctgtgggtcatactgttccgcttcaaagcggcggcttaaattcttaacgactttaccttcgccggttatccagatgaagtaatcatcggcagggatttgcatctgcgccagacgcgcatctaccgcctgctcatcatgtgccagccattcgatattaaaaccatcaaggtgcgcgagataatcctgacaggcgttatcccgcacgctaaccagcgcactaacttgcggtttaacggcaagtttgctcaacgtttccaggcggcggcgcaatgcaggcattccggattcatcgcagacatacagctgatacgcgtaatcttccggcaccaccaggctaccgcgcggacctgccaccgtaagtttatcgcccggttgcgcctgcatcgcccagccgctggcgaccccaccgtcgtgaataaagaaatcaatcgccagttcatggcgtagttcgtcatacagcggcgtatagtcacggctcggtgggcgtggtccttccggccagacgatgccctcttccgttaccgttggcggcacaaagtgagcgtcaggttgaggaaagaagagtttgctgtgatcgtcaaagccacggcttgtaaaaccgtccagcgcctcgccgccgaggacaatgcgctgaaaaccggcgctgatgcgctcaacgcgtaacacagtcagttcacggaagcgcagatcattgcgaacgcgctgcgggtagcggggggtgttattcattgttatcgccttcgtgatggtaatcagatatatctaaataaaactcgcaaatgataatgattgttaatcatgataaatgcaagcgatttgtagaactgatatgtctatagtctgataagacgaaccgcctcttctcaggcatcattactcaacgccggatgcggcgtgaacgccttatccggcctacgtgtgagatgagtccacgtttaaaaatcatttttacacttgcaagaacgctcatatcagatataaattagatatatctaattaagcaaaaggaggctgatatgagccatcatcacgaagggtgttgtaaacatgaaggccagccacgccatgagggctgctgcaaaggtgagaagagtgaacacgagcactgcggacacggtcaccagcatgaacacggtcaatgctgcggtggtcgccacggtcgcggcggcggtcgtcggcaacgtttctttggtcacggtgaattacgtctggtgattctggatattctcagccgcgatgacagccacggttacgaattgattaaagcgattgagaatctaacccaggggaattacaccccaagcccgggcgtcatctacccaacgctggattttctgcaggagcagagcctgattaccatccgcgaagaggaaggaggtaagaagcagattgcgctgaccgaacaaggcgcgcagtggctggaagaaaaccgcgaacaggtggagatgattgaagaacgcatcaaagcgcgttgcgttggcgcggcgctgcgccagaacccgcaaatgaagcgggcgctggataattttaaagcggtgctggatttacgcgtcaaccagagcgatatcagtgatgcacaaataaaaaagatcattgcggtgatcgaccgcgccgcttttgatattacgcaactggattaatcgccgcatccgccagtggcgcggtgcaattgccggatgcgacgcttgacgcgccttatccggcctacacccgctacacaccccgcaggcctgataagatgcgccagcatcgcatcaggcattgtgctccaaccgccggatccggcataccgattaatgcagtaccgtcaccgcgtcttccagtcggctggcgcggtgtttcaccatcgcgctcacctgcgcactctcttccaccagctcggcatttttctgggtgatcaggttaagctcatccactgcacgggtcaggctggaaagcccatcggcctgttccagcgtactatggctaatctgggcgatcaactgggtgacgtttttcacctgtgccacaatatcttccatcgtccgtccggcggcgtgtacctgctggctaccggattgcaccttatcagcactggcatcaatcagcttgcgaatatcgttggcagcattagcgctgcggctggctaaatgacgcacttcccctgccaccactgcaaaacctttgccctgttcgccggcacgcgccgcttccaccgccgcattcagggccagaatattggtctgaaacgcaatatcgttaatcaggctagtaatggtgccaatgcgctgggtactgtcggcgatatcgtccattgtcttgatcaccgtggtcatcgcctccccaccctgcactgccgcattactggcagtgatactcagtttatcggcagcgctcgccgtggcagagttctgtttcacgctcgccgccatttggttcatggtcgccaccgtttgctgaacgttatcaactgtctgctgggtatgttcgttcagttcatcggtgcctttcgccagcgtctcactgccatttctgacactggacacctggctactgacatcgttaattagccaacggcacatcaggccaagttgccctaccgcacgtaatgtcagccccagctcatcgctgcgattcagatgctcaacactattacgttctccggtcgccaccttcagtgcctgatgggcaacattttctatcgggcgcacaatctgccattcaaaacaggcgcttgccaacaataccactaacgcacagaggatatacgtcaccaccggggcagcaacaaaccaaagcatggccgccagcaagataaacatcagggtcatcactccacgcgcccgccagcgaagcggtaaactaggcagtttacccagccagcctttacgcaccaccaggcctttatgaatacgcttactggtacgtccggcgttcaacgctttgtacagcggctccaccgccgcgatctcttcatccgtcgcccgggtacgaatgctcatatagccactgatttttccctcgcgcaccatcggtaccgcattggcccgcacccaataatggtcaccatttttgcggcgatttttcacgatgccgctccagggctccccttttttcagggtgaaccacatatccgcaaacgccgcttttggcatatccgggtgacgcaccatgttgtgcggctgcccttgtaactcttgcaaggtatagccgctcacctgcacaaaagtgtcattagcatgagtgatatagctttgcagatcggtagtggacatcagagtggtatcgtccgccagcggggtattttgctgggtgacatacggatgagaagacatgttcgcgtcctgtgcaggttatatggttgttaacttcttgtcagagtttatgtcggccccgctgcggttatctttaaccgattaatttgatttagatcgcaatttgcgatttaaacacaaatctaattccttgatttaaaatactttcactctgttactatacgaaaacgttaattatcttgcccaaaaatcaggcaattattgccctgaaaacgtgcatttgcgcagcaatcatcaaatccatacccgacaaaaaccgtgcaaaataacaacaaatgttaacagatagcattaaatattgcacaaatgataaccgaatttgtgtttatcccgattttcgcgatcgcagccggagtggcgcaatccctgcaatacttaaatcggtatcatgtgatacgcgagcctccggagcatattttgaacaggttacctagcagcgcaagcgctttagcgtgcagcgcccacgccctgaatctcattgagaagcgaacgctggatcatgaggagatgaaagcacttaaccgagaggtgattgaatacttcaaagagcatgtcaatccggggtttttagagtatcgcaaatctgttaccgccggcggggattacggagccgtagagtggcaagcgggaagtttaaatacgcttgtcgacacccagggccaggagtttatcgactgcctgggaggttttggaattttcaacgtggggcaccgtaatccagttgtggtttccgccgtacagaatcaacttgcgaaacaaccgctgcacagccaggagctgctcgatccgttacgggcgatgttggcgaaaacccttgctgcgctaacgcccggtaaactgaaatacagcttcttctgtaatagcggcaccgagtccgttgaagcagcgctgaagctggcgaaagcttaccagagtccgcgcggcaagtttacttttattgccaccagcggcgcgttccacggtaaaagtcttggcgcgctgagcgccacggcgaaaagcaccttccgcaaaccgtttatgccgttactgccgggcttccgtcatgtgccgtttggcaatatcgaagccatgcgcacggctcttaacgagtgcaaaaaaaccggtgatgatgtggctgcggtgatcctcgaaccgattcagggtgaaggtggcgtaattctgccgccgccgggctatctcaccgccgtacgtaagctatgcgatgagttcggcgcactgatgatcctcgatgaagtacaaacgggcatggggcgcacgggcaagatgttcgcctgcgagcatgagaacgtacagccggatatcctctgccttgccaaagcgctcggcggcggcgtgatgccgattggcgcgaccatcgccactgaagaggtgtttagtgttctgttcgacaacccattcctgcataccaccacctttggcggcaacccgctggcctgtgcggcggcgctggcgaccatcaatgtgttgctggagcagaacttaccggctcaggctgagcaaaaaggcgatatgttgctggacggtttccgtcaactggcgcgggaatatcccgatctggtacaggaagcgcgtggtaaagggatgttgatggcgattgagtttgttgataacgaaatcggctataactttgccagcgagatgttccgccagcgcgtactggtggccggaacgctcaataacgccaaaacgatccgcattgaaccgccactgacactgaccattgaacagtgtgaactggtgatcaaagcggcgcgtaaggcgctggcggccatgcgagtaagtgtcgaagaagcgtaatatcaaatcggatggcgatacgacgtcgccatccgatctttttatacgacgcgtacgcccgcaggcatcatccgctccggcgttaacagcacgctttcactgccgtcatcggtttccgcacacaacagcatgcattcgctcgtttcaccacgcattttcgctttttgcagattgcataagaccaccaccgttttccccatcagctcttcttcgctgtagtacggcaccaggctggtcacggtttgcagcgttttttgccccacatcaacctgtacgatgtacagcttgtcggcgttttcatggcgtttcacttccacaatctttccgacgcgcatttccagacgtgcaaaatcagcgtaagccacggtttccattgcttcctcccttagggtaaaattttactaaactatagcaaaagtttttctcaatcctgtaggctaaaaatggagaatgcaggcgtgatcacattcgtgagccgctgtgttaccgttacagcgtcaaagaaacgcgctttatttactgaaaacaggtgacccgataagcacttcctctacaatgggggcgcacatcagggaaagtaaaaaaggtaaacatggcaacactaaaagacatcgcaatcgaagctggcgtatccctggcgacagtatccagggtcttaaatgacgatccgacattgaatgtgaaagaagagacgaaacatcgcattctcgagatcgccgaaaagctggagtacaagaccagtagtgcccgtaaactccagacaggtgcagtcaaccaacaccatattctggctatctacagctaccagcaggagctggagatcaacgatccttactatctggcgatccgccacggcattgaaacccagtgcgaaaagctgggcatcgagctcaccaactgttatgaacacagcggcttaccagacattaaaaacgtcaccggtattttaattgtcggcaaacccacgcccgccctgcgcgccgctgccagcgcgttgaccgacaatatctgttttatcgactttcacgaacccggcagcggttacgatgcggtggatatcgatctggcacgcatcagtaaagaaatcatcgacttctatatcaaccagggcgttaatcgtattggttttattggcggtgaagatgagcctggcaaggcggatattcgtgaggtcgcctttgcggaatatggccgactgaaacaagtggtacgcgaagaggatatctggcgcggcggtttttccagtagcagcggttatgaactggcaaaacaaatgctggcgcgggaagactatccgaaggcactgtttgttgcttccgattccattgctatcggcgtactgcgggcaattcatgaacgaggcctgaacatcccacaggatattagccttatcagcgttaacgatatccccaccgcgcgatttacctttccgccgctctccaccgtgcgcatccattccgagatgatgggaagtcagggcgttaacctggtgtatgaaaaagcccgcgatggtcgcgcgctgccgctgttagtcttcgttcccagcaaattaaaactgcgcggcacgacccgttaaatccccttacacactgtccggcaatcgtttttgccggacagtgctgccgtttattttcgtgatccagttaaagtaaatgcatttacctgctactttttagtaaaaattttactaaactccccagcaattacacaaactaccatcaccatgaatggttccgatttctctctaccgggaggccctatgaatcgctgggaaaacattcagctcacccacgaaaaccgacttgcgccgcgtgcgtacttttttagttatgattctgttgcgcaagcgcgtacctttgcccgcgaaaccagcagcctgtttctgcccttaagcggtcagtggaatttccacttttttgaccatccgctgcaagtaccagaagccttcacctctgagttaatggctgactgggggcatattaccgtccccgccatgtggcaaatggaaggtcacggcaaactgcaatataccgacgaaggttttccgttccccatcgatgtgccgtttgtccccagcgataacccaaccggtgcctatcaacgtattttcaccctcagcgacggctggcagggtaaacagacgctgattaaatttgacggcgtcgaaacctattttgaagtctatgttaacggtcagtatgtgggtttcagcaagggcagtcgcctgaccgcagagtttgacatcagcgcgatggttaaaaccggcgacaacctgttgtgtgtgcgcgtgatgcagtgggcggactctacctacgtggaagaccaggatatgtggtggagtgcggggatcttccgcgatgtttatctggtcggaaaacacctaacgcatattaacgatttcactgtgcgtaccgactttgacgaagcctattgcgatgccacgctttcctgcgaagtggtgctggaaaatctcgccgcctcccctgtcgtcacgacgctggaatataccctgtttgatggcgaacgcgtggtgcacagcagcgccattgatcatttggcaattgaaaaactgaccagcgccagctttgcttttactgtcgaacagccgcagcaatggagtgcagaatccccttatctttaccatctggtcatgacgctgaaagacgccaacggcaacgttctggaagtggtgccacaacgcgttggcttccgtgatatcaaagtgcgcgacggtctgttctggatcaataaccgttatgtgatgctgcacggcgtcaaccgtcacgacaacgatcatcgcaaaggccgcgccgttggaatggatcgcgtcgagaaagatctccagttgatgaagcagcacaatatcaactccgtgcgtaccgctcactacccgaacgatccgcgtttttacgaactgtgtgatatctacggcctgtttgtgatggcggaaaccgacgtcgaaagccacggctttgctaatgtcggcgatattagccgtattaccgacgatccgcagtgggaaaaagtctacgtcgagcgcattgttcgccatatccacgcgcagaaaaaccatccgagcatcatcatctggagcctgggcaatgaatccggctatggctgtaacatccgcgcgatgtaccatgcggcgaaagcgctggatgacacgcgactggtgcattacgaagaagatcgcgatgctgaagtggtcgatattatttccaccatgtacacccgcgtgccgctgatgaatgagtttggtgaatacccgcatccgaagccgcgcatcatctgtgaatatgctcatgcgatggggaacggaccgggcgggctgacggagtaccagaacgtcttctataagcacgattgcattcagggtcattatgtctgggagtggtgcgaccacgggatccaggcacaggacgaccacggcaatgtctggtataaattcggcggcgactacggcgactatcccaacaactataacttctgtcttgatggtttgatctattccgatcagacgccgggaccgggcctgaaagagtacaaacaggttatcgcgccggtaaaaatccacgcgcgggatctgactcgcggcgagttgaaagtcgaaaataaactgtggtttaccacgcttgatgactacaccctgcacgcagaggtgcgcgccgaaggtgaaacgctcgcgacgcagcagattaaactgcgcgacgttgcgccgaacagcgaagcccccttgcagatcacgctgccgcagctggacgcccgcgaagcgttcctcaacattacggtgaccaaagattcccgcacccgctacagcgaagccggacaccctatcgccacttatcagttcccgctgaaggaaaacaccgcgcagccagtgcctttcgcaccaaataatgcgcgtccgctgacgctggaagacgatcgtttgagctgcaccgttcgcggctacaacttcgcgatcaccttcagtaaaatgagtggcaaaccgacatcctggcaggtgaatggcgaaagcctgctgactcgcgagccaaagatcaacttcttcaagccgatgatcgacaaccacaagcaggagtacgaagggctgtggcaaccgaatcatttgcagatcatgcaggaacatctgcgcgactttgccgtagaacagagcgatggtgaagtgctgatcatcagccgcacagttattgccccgccggtgtttgacttcgggatgcgctgcacctacatctggcgcatcgctgccgatggccaggttaacgtggcgctttccggcgagcgttacggcgactatccgcacatcattccgtgcatcggtttcaccatgggaattaacggcgaatacgatcaggtggcgtattacggtcgtggaccgggcgaaaactacgccgacagccagcaggctaacatcatcgatatctggcgcagcaccgtcgatgccatgttcgagaactatcccttcccgcagaacaacggtaaccgtcagcatgtccgctggacggcactgactaaccgccacggtaacggtctgctggtggttccgcagcgcccaattaacttcagcgcctggcactatacccaggaaaacatccacgctgcccagcactgtaacgagctgcagcgcagtgatgacatcaccctgaacctcgatcaccagctgcttggcctcggctccaactcctggggcagcgaggtgctggactcctggcgcgtctggttccgtgacttcagctacggctttacgttgctgccggtttctggcggagaagctaccgcgcaaagcctggcgagctatgagttcggcgcagggttcttttccacgaatttgcacagcgagaataagcaatgaggatcatcgataacttagaacagttccgccagatttacgcctctggcaagaagtggcaacgctgcgttgaagcgattgaaaatatcgacaacattcagcctggcgtcgcccactccatcggtgacagtttgacttaccgcgtggagacagactccgcgaccgatgcgctatttaccgggcatcgacgctattttgaagtgcattactacctgcaagggcagcaaaaaattgaatatgcgccgaaagagacattacaggtagtggaatattatcgtgatgaaactgaccgtgaatatttaaaaggctgcggagaaaccgttgaggtccacgaagggcaaatcgttatttgcgatatccatgaagcgtatcggtttatctgcaataacgcggtcaaaaaagtggttctcaaagtcaccatcgaagatggttatttccataacaaataacaactacggcggcaaaaggagtttgccgccaccgctaccctactcattttcggagatgtgttatgtctgataccaaacgtaatacaatcggcaaattcggcttgctcagcctgacttttgccgccgtttacagctttaacaacgttatcaataataatattgagcttggactggccagcgcaccgatgtttttcctcgcgacgattttttattttattcccttctgtctgatcatcgcagaatttgttagcttaaataaaaacagtgaagccggtgtctacgcgtgggtaaaaagtagcctgggcggacgttgggcatttattactgcctatacctactggttcgtaaacctgttctttttcaccagtctgttgccgcgcgttattgcttatgctagctatgccttcctcggatacgaatatattatgacgccggttgccaccaccattatcagtatggtgctgttcgccttctccacctgggtttccaccaacggggcgaaaatgttggggccaattacctccgtcactagtacgctgatgctgctgttaacgctctcctacattttactggcaggtacggcgctggttggcggcgtacagcctgctgacgccatcaccgttgacgcgatgatcccgaacttcaactgggcgttcctcggcgttaccacctggatctttatggccgcaggtggcgcggagtccgtcgctgtgtacgttaacgacgtcaaaggcggtagcaaaagcttcgttaaagtgatcatcctcgccgggatttttatcggcgtactgtattccgtctccagcgtgctgattaacgtcttcgtcagcagcaaagagttgaaatttaccggcggaagcgtgcaggtattccacggcatggcggcgtattttggtctaccggaagcgttgatgaatcgctttgtcggtctggtgtcctttaccgcgatgttcggttccctgctgatgtggaccgcaacgccggtgaaaattttcttctccgaaatcccggaaggcatctttggtaagaaaaccgtcgaactgaacgaaaacggcgttccggcgcgcgcagcgtggatccagttcctgatcgtcatcccgctgatgattatcccgatgctcggttccaataccgtgcaggatctgatgaatactattattaatatgaccgccgcagcgtccatgcttccgccgttattcatcatgctggcttacctgaatttacgcgccaaattagatcacctgccacgcgatttccgtatgggctcccgccgcaccggtattatcgttgttagtatgctgattgcgatatttgccgtagggtttgtcgctagcacattcccgactggcgcgaatattctgaccatcattttttataacgtcggcggtattgttatcttccttggctttgcgtggtggaaatacagtaaatatataaagggattaacggctgaagagcgccatattgaagcgacgccagccagcaatgttgattaagcagaataataaaaaatgagcaggcattttccctcttcctggatgaggagagggaaaatagtttctgcctttatatttttataattacaacgataaaaggctgtactttttctttagctcatggattaacacaatgaaattaatcactgcaccatgcagagcattacttgctctgccgttttgctacgccttttctgcggcaggagaagaagcacgtccggcagaacatgacgacacaaaaacacccgcaattaccagcacatcttctcctagttttcgtttttacggcgaattaggggttggtggatatatggatttagagggtgagaataaacataaatacagcgacggtacctatattgaaggtggcctggagatgaagtacggctcctggttcggcctgatttacggcgaaggctggaccgtgcaggccgaccacgacggcaatgcctgggtgccagaccatagctggggtggtttcgagggcggaattaaccgtttctatggcggttatcgtaccaatgatggcaccgaaatcatgctcagtctgcgtcaggattccagcctggatgacctgcaatggtggggcgatttcacccccgatctgggctacgtcattcccaatacccgcgacattatgactgcgctgaaggtacagaacttaagcggcaactttcgttatagcgtcaccgcgactcctgccggacatcatgatgaaagcaaagcctggctacattttggcaaatacgatcgctatgacgacaaatacacctatccggcaatgatgaacggttacatccagtatgaccttgccgaaggcatcacctggatgaacggtctggaaatcaccgacggcacaggacagctctatctcacgggcctgctaactcctaactttgccgctcgcgcctggcaccataccggacgcgccgacgggctggacgtaccgggaagtgaaagtgggatgatggtgagcgccatgtatgaagcgttaaagggcgtttatctctccaccgcttacacctacgccaaacatcgccctgaccacgctgacgatgaaaccacctctttcatgcagtttggtatctggtacgaatacggcggcggacgtttcgccacggcttttgatagccgcttctacatgaaaaatgcctctcacgatcccagcgaccaaatcttcctgatgcaatatttctactggtaataaggactgtaatttcatgaaaataaaaactattttaacgccagtaacctgcgctctgctgataagtttttccgcccatgccgctaacgccgacaattataaaaacgtgattaaccgtactggcgcgccgcagtacatgaaggattacgattacgacgatcaccagcgttttaatccgtttttcgatctcggagcctggcatggtcatctgttgccagacggccctaacaccatgggcggctttccgggcgttgcgctgctgacggaagagtacatcaactttatggccagcaatttcgaccgcctgaccgtctggcaggacggcaagaaagtcgactttacgctggaggcatacagtattcccggtgcgctggtgcaaaaactgacagcaaaagatgtgcaagtcgaaatgactctgcgcttcgccacgccgcgcacgagtctactggaaaccaaaatcaccagcaataaaccgctggatctggtgtgggacggcgaactgctggaaaaactggaagcgaaagaagggaaaccgctttccgataaaaccattgctggcgaataccctgactatcagcgcaaaatcagcgccacccgtgatggcctgaaagtcacctttggcaaagtgcgcgccacctgggatctgctgacctccggcgaaagcgaatatcaggtgcataaatccctgccggtgcagactgaaatcaacggtaatcgctttaccagtaaggcgcatatcaacggtagcaccacgctctacaccacctattcccatctgctgaccgctcaggaagttagcaaagagcaaatgcagatccgcgatattctggcgcgtccggcgttttatctcaccgccagccagcaacgctgggaagaatacctgaagaaagggttaaccaatccggatgcgacgccggaacagacgcgcgtcgcggtgaaagcgatcgaaacgctcaacggtaactggcgcagtccgggcggtgcggtgaaatttaacaccgttacaccgagcgtgaccgggcgctggttctccggcaatcagacctggccgtgggatacctggaagcaggcgtttgcgatggcgcatttcaatccggacatcgccaaagagaatatccgcgcggtcttctcctggcagatccagcctggcgatagcgtgcgtccgcaggatgtgggctttgtccccgacctgatagcgtggaaccttagccccgagcgtggtggcgatggcggcaactggaacgaacgtaataccaaacccagccttgccgcctggagcgtgatggaagtgtataacgtcacccaagataaaacctgggtggcagagatgtacccgaaactggtggcctatcacgactggtggttacgtaaccgcgatcacaacggcaacggcgtgccggaatatggcgcgacccgcgacaaagcccacaacactgagagcggcgagatgctgtttacggtgaaaaaaggcgataaagaagagacgcagtctgggctgaacaactacgcccgcgtggtggagaaaggccagtacgacagtctggaaattccggcacaggttgctgcaagctgggaaagcgggcgtgatgatgccgccgtctttgggtttatcgacaaagaacagttggataaatatgtcgctaatggcggcaaacgtagcgactggacggtgaaattcgccgaaaaccgcagtcaggacggaacgttgctgggctacagcctattgcaggagagcgtggatcaggccagctatatgtacagcgataaccattatctggcggagatggcaaccatcctcggtaagccagaagaggccaaacgctatcgccagttggcacagcagctcgcggactacatcaacacctgtatgttcgacccgactacccagttctactatgacgtacgtattgaagataaaccactggcgaacggctgcgcgggcaaaccgattgttgagcgcggtaaagggccggaaggctggagcccgctgtttaacggtgcggcaacgcaggccaatgccgacgcggtggtgaaggtgatgctcgatcctaaagagttcaacacctttgtcccgctgggaacggcggcgttaaccaatccggcttttggcgctgatatctactggcgtgggcgcgtatgggtggatcagttctggtttggtctgaaagggatggagcgttacggttatcgtgatgatgccctgaagctggcggatacgttcttccggcacgccaaagggttaaccgccgatggaccaattcaggaaaattacaacccgctgacaggcgcacagcaaggcgcaccaaatttctcctggagtgccgcgcatttgtatatgttgtataacgattttttccgtaagcaataatttgcaactgctggcggatgcggcgtaaacgccttatccgccctacatgtgcaatcctcctggccggataaaacgcggcaagcgttgcatccggcaactgcaccgcgccactggcggatgcggcgtgaacgccttatccgccctacatgtgtgttcccgtaggtcggataagacgcgacaagcgtcgcatccggcatctgcaccgcgccactggcggatgcggcgtggacgccttatccgccctacatgtgcaattccgtaacctggataaaacgcgacaagcgtcgcatccggcgttatcaccgggcgtattctttttgaatcccatcacaaaccccgcactccccttttcccttttctccggcgacggctaaattagaactcatccgaccacataacaattattttacatactggacaattttatgagctacccgagcctgttcgccccgctggatttaggttttaccacgttaaaaaaccgcgtgttgatgggcagtatgcacaccgggctggaggaatacccggacggtgccgagcggctggcagcgttttatgccgaacgcgcccgtcacggcgtggcgctgattgtcagcggcggcattgcaccagatttaacaggcgttggcatggaaggtggcgcaatgctcaacgacgccagccagatcccacaccatcgcaccattaccgaagcggtacatcaggaaggcggcaaaatagccctgcaaattttgcataccgggcgctacagctaccaaccgcatctggtcgccccgtccgcattgcaggcccccatcaaccgtttcgtgccccatgagttaagccatgaagagatcctgcaactgatcgacaatttcgcccgctgcgcgcaactggcgcgggaggcaggatacgacggtgtagaggtgatgggttccgaagggtatttgatcaacgaatttctgacgctgcgcaccaatcagcgtagtgaccagtggggcggcgattaccgcaaccggatgcgatttgccgtagaagtagtgcgtgcggtgcgcgaacgcgtcggcaacgacttcattattatctaccgactgagcatgctcgacctggtcgaagacggcgggacttttgccgaaacggtagagctggcgcaggccattgaagcggcgggcgcgaccattatcaacaccggcattggctggcatgaagcacgtattccgaccattgccacgcccgtgccgcgcggcgcatttagctgggtcacgcgcaaactgaaaggccacgtcagcctgccgctggtaaccaccaaccggattaacgatccgcaggttgccgacgatattctcagccgcggcgatgccgatatggtaagcatggcgcgaccgtttcttgctgatgcggagctgctgagtaaagcgcaaagcggacgagccgatgagatcaacacttgtattggctgcaatcaggcctgtctcgatcaaatcttcgttggcaaagtcaccagctgcctggtgaatcctcgcgcctgccacgaaaccaaaatgccaatccttcccgccgtgcagaaaaaaaatctggcggtggtcggtgcgggacctgctgggctggcgtttgccattaacgcggcggcgcgtgggcatcaggtaacattgtttgacgctcatagcgagattggcgggcagtttaatatcgccaaacagatccccggcaaagaggagttttacgaaacgctgcgctattaccgccggatgatcgaagtgacgggcgtgacgctaaaactcaatcacaccgtgacggcggatcagttacaggctttcgatgaaacgatcctcgccagtgggatcgtgccgcgcactccgcccatcgacgggatcgatcatccgaaggtattgagttatctcgatgtactgcgcgacaaagcgccggttggcaacaaagttgccatcatcggttgtggcgggattggttttgatacggcgatgtatttaagtcagccgggcgaatccaccagccagaatatcgccgggttctgtaatgaatgggggatcgacagtagcctacaacaggctggtggcttaagcccgcagggaatgcagatcccccgtagcccacggcagattgtgatgctccagcgcaaagccagcaaaccaggacaggggttaggcaaaaccaccggctggatccatcgcaccaccctgctcagccggggtgtgaaaatgatcccaggcgtaagttatcagaagattgacgatgacgggctgcatgtggtgatcaacggcgaaacgcaggtattagcagtggacaatgtggtgatctgcgcagggcaagagccaaaccgcgcgctggcgcaaccgctgattgatagcgggaaaacggtgcatttaattggcggctgcgatgtggctatggagctggacgcacgacgggcaattgcccagggaacacggctggcgctggagatttaaatcgttatttgaagcgccggatgcaacgcatccggcacgtcgcgttaatcaataaacaaggcgggagaaatgccgaatcgcgttgccaattttttagcgtgttccagcgttaatttcctcttcccgctcaaaacgcgactcaccatagatttactgccaatttccggcagatcggaaagggttaaaccatattgatccataagggtacgaatcacggctataccgccaggcatggcttgagccatggcattaaattccgcaaattcgggcgcactttcttcccacgcggttattttggcacacaccagatccagcaaggggttttcaggatcgttgagcagcagatgatctaccagttccagcgcctgggtgtattgttcctcgttctgaatacccgccagaaaaggtgccacagcagttagcttttctcctgcttgcaagatgtcggcaatcgcaatcattttttccccttagtacgatgaacagcggtaaagaaatcgtattctttatgcgtcataacttcacgtatgtagcacttttggctttcaaaaaagaccattgctacaacacgtaattcattgcccccaacattgaaaacataatgcttatccagatatttgaagttatccagagatgggaatactgcttttaaactctcaggttttttgaaatatcccttagcaatcgtgttccccagagccaccaactccgttttatgttgcgggtatttttccgcagcatctttcaatgctttttgagttatcaggtgcattcttcatcacgtccgttgacaaattggcaatatgataacatccgttgccagattggcaacggatgaatttatctgtgtgacggaagaataaacgtagaaaaacgctaaacaagagaatgtagacgatggtgacagggattttttgttttatggaagcgcgattccagaactgggcagacattgccggatgcgacgcttgccgcgtcttatccggcctggagtaacgtgctgaacgtaggccggataaggcgtttacgccgcatccggcaggtaactcccaatcttaccgacgacgtcccagcttcaccgctttcagtaccacaaatttattattcgtcgcaatagtggtgcagttgccgaaaatcttcttcagtttatggaagtaatccaggtgacggttggcaacgatatacagctcgccgttgattttcaggcagcggcgggcgtggtggaacatctcccaggcgacgttatcggtcagcgcatgttgttggtgaaacggcgggttgcagagcacagcattaaagcggaaaggctccacgccggagagcgcgttgttgatcataaactcgcagcgatccaacgcctctggcatgttggtttcaacgttcaaacggctggaagcaaccgccatcgggctttcatcgacaaacaccactttcgcctgcgggtttttatcaagcagcgtcagaccaataacgccattaccgcaaccgagatcgacaatctccccttcgagattctctggcagatgttgcataaagaagcgcgcgccgatatcaagcccggtgcgggagaagacattcgcatggttgtggatagtccagtcagtaccttccagcttccagctaacggtctgcggcgcatcggccagctgcggttcattgaaagtgcaattaatcaggcgcgcttttttccatgccagcgtggtggtggttgggccgagcactttttcgaacagttccagcgtggaagtgtgaatgtcacgggccttggcaccggcaataatacgtgtatcgctcgtgaccactttgcgcagcgcacgcagttgctgttccagcaatgccagtgttttcggcactttgatcagcaccacacccggctgttgcgggtagtcggcggtgctgtcgagaaacttcacgctgctctcatcaatcccgttgaggcgtaaattctcgcgcgtcgccagttcactgatgtaactgtcgccaatgctgtacggcttatgttccgccagtgcgcagcttaacgcaccaaaggcatcattcaggatcaacaccgggccgcggatttctgtgtcgtccaactgttgcagcaaatattcatccgccgcttcccacgcctgtagcgggttaacgtcatccgtcgccggaaaacgttgtagtgtcagactacggaaaccgttgtctaagtggctcatcggccctcctgaatgataaaatttcgacattgcccctgaaaagggtgcgtgagtataccctttttctctttttcgtgggcggttatgagcaatcttacttatcttcagggttatcccgagcagctactttcccaggtgcgaacactgattaacgaacagcgtctgggcgatgtgctggcaaaacgctatccgggaacacacgactacgccaccgataaagccctctggcaatatactcaggatctgaaaaatcagtttctgcgtaatgccccgccgatcaataaagtgatgtatgacaataagatccatgtgctaaaaaacgcgctcgggttacataccgctgtttctcgtgtgcagggcggcaagctgaaagcaaaggtggagatccgcgtcgctaccgtgtttcgcaacgcgccggaaccgtttttgcgcatgatcgtggtgcacgagctggcgcacctgaaggagaaagagcataacaaagcgttttaccagttgtgttgtcatatggaaccccagtaccaccagcttgagttcgacacccgactgtggctaacgcagttgagccttgggcagaacaaaatctgaaaatgatgtcaggcgttatcttttctttctttagcgcctaaaatcgacctcccccctttcgttaaggataacgaccatgctgcgcgcatttgcccgccttcttctccgtatttgtttttctcgccggactctaaagattgcctgcttactgttacttgtggcaggagcgaccatccttatcgccgatcgcgtaatggtcaacgccagcaaacagctgacctggagcgatgtcaacgccgttccggcgcgtaacgtgggtttattgctgggggcgaggccgggtaatcgctactttacccgacgtattgataccgcagcagcgttgtaccacgccggaaaagtgaaatggctgctggtaagtggcgataacggacgtaaaaattacgatgaagcaagtggtatgcagcaggctttgatcgctaaaggcgtaccagcaaaagtgatcttctgcgactatgccggattcagtacgctggatagcgtagtgcgtgccaaaaaggtttttggtgaaaaccatatcaccattatcagccaagaatttcataatcaacgcgccatctggctggcaaaacagtacggcatcgacgctatcggttttaacgcgccagacctcaatatgaagcacggtttttatactcaactgcgggagaaactcgctcgtgtcagcgccgtgattgacgccaaaatcctccatcgccagccgaaatatctcgggcctagcgtcatgattgggccgtttagtgagcatggctgtccggcgcagaaataatgcgtatctgcgcacgtcgaagatgaaaaaggcgtgctacattgacgacagaatccctttatggagtatccacgcgttatgatacgtttcgctgtgattggtacgaactggatcactcgccagttcgtcgaggccgcccatgagagcggtaaatacaagttaaccgccgtatattcccgcagccttgaacaggcccagcacttcgccaatgatttttctgtcgagcatctgtttaccagcctggaagcgatggcggaaagcgatgccattgacgcggtgtatattgccagcccgaattccctgcatttttcccagacacaacttttccttagccataaaattaatgtgatttgcgagaaaccgctggcgagcaatctggcggaagtggatgccgccattgcctgtgcgcgggaaaatcaggtggtgctgtttgaggcatttaaaaccgcctgcctgccgaactttcatttgttgcgccaggcgctgccgaaagtcggcaaactgcggaaagtctttttcaactattgccagtattccagccggtatcaacgttacctggatggtgagaatcccaacacctttaatccggcattctctaacggtagtattatggatatcggtttttactgtctggcgagcgcggtggcgttatttggtgagccgaaaagcgtgcaggcaaccgccagtttgctggcaagcggcgttgacgcccagggcgtggtggtgatggattacggtgatttcagcgtcaccttgcagcacagtaaagtcagtgattctgtcctggcgagcgagattcagggcgaagcaggaagcctggtgattgaaaaactgtctgaatgccagaaagtgtgcttcgtgccgcgtggcagccaaatgcaggatctcacccagccgcagcatattaataccatgctctacgaagcagagctgttcgctaccctggtggatgagcatctggtggatcatccagggctggcggtcagtcgcatcaccgccaaactgctgaccgagatccgccgccagactggggtgatttttccggcagatagcgtaaaactataattgccaaagtaaaacagtgtaaaaggtatgtaacagaccattgactggctgaatggtctgtcatactttgttacctgcaaaggggagtaacttcattgccggtcgatcgtcattacgatgtgtgaaaaaacacatccggtcaccgggcaacccgaaaggaatacgcagacgtattccttttttgttgtaagtgagaccttgccggaaggcgaggtctatgcataaaaagcagcggctgacgtcttccgacgttggccgtttttttatgtgtaaggaacttctatgaatactgtcggcacgccgttgctatggggcggattcgctgttgttgtcgccattatgctggctatcgacctgttgttgcaggggcgtcgtggggcacatgccatgaccatgaaacaggctgcggcctggagcctggtctgggtgacgctgagcttactgtttaacgccgctttctggtggtatctggtgcaaaccgaaggtcgcgccgttgccgatccacaggcactggcctttctcacaggttatctgattgagaaaagcctggcggtcgataacgtctttgtctggctgatgttgttcagctatttctctgttccggcggcattacaacgccgcgtgctggtgtatggcgtgctcggggcgattgttctgcgtaccatcatgatcttcactggcagctggctaattagccagttcgactggatcctgtatatcttcggtgccttcctgctgtttaccggcgtgaagatggcgctcgcccatgaagatgaaagtggcattggcgacaagccgctggtgcgctggctacgcggtcatttgcgcatgaccgacaccatcgacaacgagcatttctttgtgcgtaagaatggattgctgtacgccacaccgctgatgctggtactgattctggtggaattgagcgacgtgattttcgccgtggatagcattccggctatcttcgccgtgaccactgacccgttcattgtgctgaccagtaacctgtttgcgatcctcggcctgcgtgcgatgtatttcctgctggcgggcgtagcagagcgtttcagcatgctcaaatatggcctggcggtgattctggtgtttatcggtatcaagatgctgattgtcgacttctaccatattccaatcgccgtcagcctgggcgtggtgtttggcattctggtgatgacgtttattatcaacgcctgggtgaattatcggcatgataagcagcggggtggataatttttaatctgcctaagccgtgtaccctgtcattaacatgagcaccgttttctccctctcccttccagggagagggtcggggtgagggtaatttttcgcaccgatgctggcctgttcccctcaccctaaccctctccccaaacggggcgaggggactgaccgagtccttttttgatgttgtcatcagtctggaagccgcacgttggctttatttttatgtcaaagaaatgtaaccattaagtttcaaaatatgacctctctttaaaatccagcatttttcgcttcccgaagctgtaactttccttatactcgaccttgcaaacactttgttacatcctgaaagatgcgtcgacagaacgcaccagggatgtgcgacaacacaatgaaaggatcgaaaaatgactacgcaacgtagtccggggctattccggcgtctggctcatggcagcctggtaaaacaaatcctggtcggccttgttctggggattcttctggcatggatcagtaaacccgcggcggaagctgttggtctgttaggtactttgttcgtcggcgcactgaaagccgttgcccccatcctggtgttgatgctggtgatggcatctattgctaaccaccagcacgggcagaaaaccaatatccgccctattttgttcctctatctactgggcaccttctctgctgctctggccgcagtagtcttcagctttgccttcccttctaccctgcatttatccagtagcgcgggtgatattagcccgccgagtggcattgtcgaagtgatgcgcgggctggtaatgagcatggtttccaaccccatcgacgcgctgctgaaaggtaactacatcgggattctggtgtgggcgatcggcctcggcttcgcactgcgtcacggtaacgagaccaccaaaaacctggttaacgatatgagcaatgccgttacctttatggtgaaactggtcattcgcttcgcaccgattggtatttttgggctggtttcttctaccctggcaaccaccggtttctccacactgtggggctacgcgcaactgctggtcgtgctggttggctgtatgttactggtggcgctggtggttaacccattgctggtgtggtggaaaattcgtcgtaacccgttcccgctggtgctgctgtgcctgcgcgaaagcggtgtgtatgccttcttcacccgcagctctgcagcgaacattccggtgaatatggcgctgtgtgaaaagctgaatctggatcgcgatacctattccgtttctattccgctgggagccaccatcaatatggcgggcgcagcaatcactattaccgtgttgacgctggctgcggttaatacgctgggtattccggtcgatctgcccacggcgctgctgttgagcgtggtggcttctctgtgtgcctgtggcgcatccggcgtggcgggggggtctctgctgctgatcccactggcctgtaatatgttcggtattagcaacgatatcgccatgcaggtggttgccgtcggctttatcatcggcgtattgcaggactcttgcgaaaccgcgctgaactctagtactgacgtgctgttcactgcggcagcttgccaggcagaagacgatcgtctggcaaatagcgccctgcgtaattaattgtttaacccctttcgtctacggcggaaggggttttctcaactttaaacggatcaattccccttttctgcatccgccagaaacgaatgatattcaggccattcataagcagaaaactaccctcaatcatcgtgccgcctatgctccccgcccagaagttgtgaatcacccagcaacacgtactaaaccacattacgcagcgcatggtcagccctttacagcagaatagcgcccaggtactgacaatcgtgccgataaccggcaatagttcgacaggatgatggaacttcgcgaggccaattccgccagtcagcacaataaaaatcgccattacccataagctgcgcgtgcgtaaggtaatcaatgtacgaatggcattaaggatggcactggcaccagcgggataggtgcccagaagaaaaaaatgtacgccaataacggcgctatagacgctaagctgctttttgaagcgacgttcgtcacgattgaaaaatgttgtgataccaatcagaaaggcgatgacacccacgccctgggccagccaatacgcggtcatgataaatccttagcaggtatggaaaagcaaacggcgcttcacattatgaaacgccgttttttattaacaactcatttcgactttatagcgttacgccgcttttgaagatcgccagttcgcggaagtcgttacgctcgttacaggtttgcttaccgttggcaaactcaacgatggtgtcgataaattcttccagcaactgcggcatcgctttaccgtggatcaactgacccgcgtcaaagtcgatccagtgttttttcttcgccgccagttcactgttggtggcgattttcaccgtcggcacaaatccaccatacggcgtgccacgaccagtactgaacagcaccatatggcagcccgcacccgccagggcgctggtcgctacggcatcgttacccggcgcacttaacaagttcagccctggcgttttcagacgctcgccgtaacgcagcacgtcaaccacgacgctggaacccgctttctgggtacagccaagacttttgtcttccagcgtggtgataccgcccgctttgttccccgggcttgggttttcatagatcggctgatcatgggcaataaagtactgtttgaagtcgttgaccatggtgaccagtttttcaaacgttgcttcgtcgcggcaatggtccatcagcaactgctctgcgccaaacatctccggcacttcggtcagtacggtagtaccgccgttagcaatcacgtagtcagagaaacgccccagcatcgggttagcagtaataccagaaagaccgtcagaaccaccgcactccagaccaaacttcagttcgctgagtttgcctggctcgcgtttatcgttgcgcatcacgttatacagctgatgcaaatgctcgattccggcttcgatctcatcatcctgctgttggcagatcatgaaatgaacgcgttcaggatcgatatcgcccagcgtttcacggaatgcggcaacctggttgttttcacagcccagaccaatcaccagcactgcgcctgcgttcgggtggcgcaccatgttttgcagcatggtgcgggtattaatgtgatcgtcgcccagctgactgcagccgtaggtgtggctgaagaggaacacgccgtcagtaccttcggcgttgttggtctctttcagaaaacggttctggatctgccgcgcgatgccgttgacacagcccacggttggcaggatccacagctcattacgcaccccgacatcgccgttagcgcgacgatagatctgcacttcacgatctgccgcttgcgcaggcagatcctgaaaatcaggttgatagcgatactgatccagatcgctcagattcgtgcgcgtattgtgggcgtgaacgtgaacacctgccgcaatatccgccaatgcataaccaatcggcaggccatatttgatgacattggccccttttgcgatatccgttaacgcaaatttatgtccacgagcaacatcctggcgcagcgtaacagtctggttatcgacactgacttctgtgccttcagccaaatctgctaaagcgaccgcgacgttatccagcgcatggatcttgatgtattgcatatcaaccccagaccttagttcagttcaatggcgaagtagtcacgcgcattgttaaagcaaatatttttcaccatctcgcccagcaggttgatgtccgccggtgcttcgcccgcttccacccagcgaccgatcatctggcacagaatgcggcggaagtattcgtgacgggtgtaactcaggaagctacggctgtcagtcagcataccgacaaagcggctcagcagaccgagctgcgccagttgggtcatctgacgttccataccgtctttctgatcgttaaaccaccagccggaaccgaactgcattttgcccggcataccttcgccctggaagttaccgatcatggtgcccagcacttcgttatcgcgcgggttcaggcagtacagaatggttttcggcagcaggttttcttcattctgcttgctcagcaacttagacagctcttccgccatcggacggtcgttgatggagtcaaagcctacatccggccccagcagtttgaactgacgcaggttgttattacgcagcgcgccaatgtggtactgctgtacccagccgcgacgtgcatattcggcaccaaggaacaccagtaccgcagttttgaactgcgccacttcgtgctcgctcagggtttcgccagccagacggcgcgccagaatgctgtccagttccgcttcgttcgcttcagcaaacatcaccacatccagcgcgtggtcagacactttacagccgtgagcggcgaagtgatccagacgtttggtcagggcagtttgcaggtcagcaaagcggcgaatgtcggtatcggaaacttcgcccagcttcgccatgtagtcgttaaaggtcgcctgttcgatgttgaaggctttgtccggacgccagctcggcagcactttgatggtgaaagagccgtctttggcgatctctgcgtgatgctccagagaatcgatcgggtcatcggtggtgccgaccattttcacgttcatctgctgcatgatgccgcgcgcggagaagttatcctgcgccagcagttcgttacattcgttccagatttcatcggcagtactcggagaaagcaatttgccagtgataccaaacggacggcgcagttcgaggtgcgtccagtggtataacgggttgccgatagtgtgcggaacagtcgccgcccaggcgtcaaatttttcacggtcagacgcatcaccggtacacagacgctcggccacaccgttggtacgcatagcgcgccatttgtagtgatcgcctttcagccagatgtcatacaggtttttaaaacgatagtcttccgcaatctgctgcggcggcaaatggcaatggtaatcgaaaatcggctggtcttttgcgtagtcgtgatacagacggcgggcaaattcggtatctaacaggaaatcttcagtcataaacggagtcattttcgtcttcctctcaacgagtgagctagcttgcttatggtgcgatgctgacaaagttatcacaccaatttccagagtccgaagatattttcgtgagttagatcaataaacgtagttaaaaaaattactctcaaagtggtaaatctcgctgcaggccgcgccagtactggccttgctgtcgtcaggtaatgtccctacaaatattcccacatttgtgatggctctcaccttttaaagttgtatgacaagttatctttctgccgtcgcaaatcataagtcgacggaatgcaaattgccgattcattcatttgttagatgaatcgggttaaccggtacggaagccgaattagcacgaaactttcatggcaacgttcggggcgtgccggttttttttcggttacccggtcgtaactaacatcttcagcctctggcgggatgatggccgcgcttcctgcggatataacaaaacgatgaggttttacatgcgtaaaattaaagggttacgttggtatatgatcgcactggtgacgctcggcaccgtgcttggttacctgacgcgtaacactgtggcggcagctgcgccaactctgatggaagagttaaacatctccacccaacagtattcctatatcatcgcagcctattctgctgcttatacggtcatgcaaccggtagcaggttatgtactggatgtgctgggtacgaaaatcggttatgcaatgtttgctgtgctgtgggccgtgttctgtggtgcaaccgcgctggcaggtagctggggtggcctggctgttgctcgtggtgcggtcggtgccgcggaagcagcgatgatcccggcgggtctgaaagccagctccgaatggttcccggcgaaagagcgttccatcgcagtaggctactttaacgtaggttctagcattggtgcgatgattgcgccgccgctggtggtatgggcaatcgtaatgcacagctggcagatggcatttatcatctccggtgcattgagctttatctgggcgatggcatggctgattttctataaacatccgcgcgaccagaagcatctgaccgatgaagaacgcgactatattattaatggtcaggaagcccagcaccaggtgagcacggcgaagaaaatgtccgttggtcagatcctgcgtaaccgtcagttctggggtatcgcgctgccgcgtttcctggcagaaccggcctggggtacttttaacgcgtggatcccgctgttcatgtttaaagtttacggctttaacctgaaagagatcgcgatgttcgcctggatgccgatgctgtttgctgacctcggttgtatcctcggtggttacctgccgccgctgttccagcgttggtttggtgtgaacctgatcgtttcccgtaagatggtcgtaacgctgggtgcagtgctgatgattggcccgggtatgatcggcctgttcaccaacccgtatgtcgcaattatgctgctgtgtatcggtggttttgcccaccaggcactgtctggcgcgctgattacgctctcttccgatgtgtttggtcgtaacgaagtggcaacggcaaacggtttaaccgggatgtccgcatggctggcaagtacgctgtttgcgctggttgtcggtgcactggctgacaccatcggcttcagcccgctgttcgcagttctggcagtgttcgacctgttaggtgcgctggttatctggaccgtgttgcagaacaaaccggcgattgaggtggcgcaggaaacacataacgatcccgcaccgcaacattaacgtttcgtgtaagttttagtttcccttcaaagccgccttctcaggcggctttttcatcactgcgagtagagctaaactcgcaaaagtggtataacaaatatagtctgccgtatcatgcctggagcgcatatggaaatcactgaaccacgccgtttgtatcaacaacttgccgctgacctgaaagagcgcatcgaacagggcgtctatctggtgggtgataaactgcctgcagaacgctttattgccgatgaaaagaacgtcagccgtacggtagttcgtgaagccatcatcatgctggaagttgaaggctatgtcgaagtgcgtaaaggtagtggtattcatgtggtttccaaccagccgcgccatcagcaggcggctgacaataatatggaattcgccaattacggtccgtttgagttgcttcaggctcgccagctcatcgaaagtaatattgccgaattcgcggcaactcaggtaacgaaacaggacatcatgaaactgatggccattcaggaacaggcgcgcggcgaacaatgcttccgtgattccgagtgggatttgcagttccacattcaggtcgctctggcgacgcagaactccgccctggcggctatcgtggaaaaaatgtggacccagcgtagtcataacccgtactggaaaaaactgcacgaacacattgattcccgtaccgtcgataactggtgtgatgaccacgatcaaatcctcaaggcgctgattcgcaaagatcctcatgctgctaagctggcaatgtggcagcatctggaaaacaccaagatcatgttatttaacgaaaccagcgacgacttcgagttcaatgccgaccgctatctattcgccgaaaacccggtggtgcatctcgatacagccaccagcggcagtaaatgaaattcctgtccgacaggcgctgcaatgcgcctgtttgtctcgtcggtaagcgaaaagtataaagtgtcagcctgtgtaaatcctctcgccaccctcccctgcattcagcaaaatcagactccacggacatgtaattttgataacgaacaacgttgacctttgttacaattagattcaatttgaatttatgtttttgaatgctttcttatctcacgatttaacagggaatagttcaggctgtgttgatgtatcaaacccgcagaacataccaaaacagcaataacattgcggtagtgcatcttttaaaaccagcgtggcgttaaccgattcaccaggaataatgaatggaacttttgacccaattgctgcaagccctgtgggcgcaggattttgaaaccctggccaatccaagcatgattggcatgttgtattttgtcttgtttgtaattttgttccttgaaaacggcttgcttccggcggcctttttaccgggcgacagtttactggtattggtcggcgtgttgattgcgaaaggcgcgatgggctatccgcaaacgattctgctgctgaccgttgccgccagcctcggctgctgggtcagctatattcaggggcgatggctgggcaatacccgcaccgtacaaaactggctatctcatttacccgcgcattatcatcaacgcgcacaccatctttttcataaacacggtttaagcgcgctgttaattggtcgctttattgcgtttgtcagaacactgctgccgacgattgccgggttaagtgggctgaataacgcgcgctttcagtttttcaactggatgagcggtctgctgtgggtattgatcctgacaactctgggttacatgctcggcaaaacgccggtatttttaaagtacgaggaccagctgatgagttgcctgatgctgctcccggtggtgctgctggtgtttggcctggcaggttctctggtcgtgttatggaaaaagaaatatggaaatcgggggtaagggatgcaaatacctcgcatgagccttcgccagctagcctggtccggcgctgttttacttctggtcggcacgctgttgctggcctggtccgcggttcgccagcaagagtctacgctggcgattcgtgccgttcatcaaggcacaacgatgccagacggttttagtatctggcatcaccttgacgctcatggcattcctttcaaaagtatcacccccaaaaacgacactctgttaattacatttgactccagcgaccagagcgccgccgcaaaagcggtcctcgacagaacattgccccatggctacatcattgcgcagcaggacaataacagtcaggctatgcagtggctgacccggttacgggataactctcatcgcttcggataacttcctgttatccgaaacatatcactcactttggtgatttcaccgtaactgtctatgattaatgaggcggtggttaacactaccgcttcgttgtctggacaatcgttcctttgtaataggtccgaatcacaatggaaggttcaagaatgaaataccgcatcgctttagctgtttctctctttgctcttagtgccggtagttatgccactaccctgtgtcaggaaaaggagcaaaatatccttaaggagatcagctatgccgaaaaacaccaaaaccagaatcgtattgacggtctgaataaagccctgagtgaagtccgggccaactgtagtgatagccagctgcgtgccgatcatcagaagaaaatcgcaaagcagaaagatgaggtggcggaacgccagcaagatttagccgaggcgaagcaaaaaggcgatgccgataagattgccaaacgcgaacggaaactggcagaagcgcaggaagagctgaaaaagctggaagcgcgcgactactaactcacaatagtcactacttactcacctggagaaaactatgagcaaagaacacactacggaacatctgcgtgctgagttgaaatccctttccgatacgctggaagaggtgcttagcagttctggcgagaagagcaaagaagagttgagtaagattcgtagcaaagcggagcaggcactgaaacagagccgttatcgcctgggtgaaaccggtgatgccattgccaaacaaacccgtgtcgcggcggcgcgtgccgatgagtatgtgcgcgaaaatccgtggacgggcgtgggcattggcgctgcaatcggtgtagtgctcggcgttctgctgagccgtcgttaattatggcggacactcatcacgcacaagggcccggtaaaagcgttctgggcatcgggcagcgaattgtttctatcatggttgaaatggtagagacacgtctgcggctggcggtggtggagctggaagaggaaaaagcgaatctctttcaacttttactgatgctgggcctgacgatgcttttcgctgcatttggtcttatgagcctgatggtgctaattatttgggcggttgacccgcaatatcgcctgaatgcgatgattgccaccaccgtggtgttgctgctactggcactgattggcggtatctggacgctacgtaaaagccgtaagtctacgttgctgcgccatacacgccatgagttagcaaacgatcggcagctgctcgaggaggagtcccgtgagcagtaaagtcgaacgtgaacgacgtaaggcgcaactgcttagccagatccagcaacaacggctggatctttccgccagtcgtcgtgaatggctggagacaacaggcgcttacgatcgtcgctggaatatgctgctaagtctgcgctcctgggcgctggttggcagtagcgtgatggcgatctggacgattcgccatcctaatatgctggtccgctgggccagacgcggttttggcgtatggagcgcctggcgtctggttaaaacgaccctcaagcagcaacagcttcgcggttaacttccctctggccggagccattccggccttatccctcaaattttttgaagatttttgacagttttccttgctaacaatcatcattcaccacgtttatgattctctccatcgacagcaacgacgctaataccgcgccattgcacaaaaaaacaatcagcagcctgagtggcgcagtggagagtatgatgaaaaaattagaagatgttggtgtactggtagcgcgcattttaatgccgattctgtttattaccgctggctggggaaaaattactggctacgcgggtacccaacaatatatggaagcaatgggcgtcccgggttttatgctgccactggtgattctgcttgagtttggtggtggtctggcaatcctgttcggtttcctgactcgcaccacagccctgtttactgcgggctttacgctgctgacggcatttttatttcacagcaactttgctgaaggcgtcaacagcctgatgttcatgaaaaacctgacaatttctggcggattcctgctgctggcaattaccggtccgggcgcgtatagcatcgaccgcctgctgaataaaaagtggtaagcacgcgctatacttaacgataaaaaacgaggaggaagctcctcgtttttgctattggaggagagaaaaatgggtcaactgattgacggcgtctggcatgacacctggtacgataccaaatctaccggcggtaaatttcaacgtagtgcttccgcatttcgtaactggctcactgccgatggcgctcctggccccactggcacaggcggttttatcgcagagaaagatcgttatcatctctatgttagtctcgcctgcccgtgggcgcaccgcacgctgatcatgcgcaaactcaaaggactggaaccgtttatttccgtttccgtagtgaacccgctgatgctggaaaacggttggacctttgatgacagttttccgggagcaaccggagacacgctctatcaaaatgaatttctgtatcagctttatctccacgccgatccacactacagcggacgagttactgttcccgtgctgtgggacaaaaagaaccacaccatcgtcagcaacgaaagtgcagaaatcatccgcatgttcaataccgcgtttgatgcgctgggcgcgaaagcgggtgattactaccctccagccctgcaaacaaaaattgacgaacttaacggctggatttatgacaccgttaacaacggcgtgtataaagctggttttgccaccagccaggaagcttacgacgaggcggtggcgaaagtgtttgaaagcctggcacgactggagcagattttaggccagcatcgttacctgaccggcaaccagctaaccgaagccgatattcgcctgtggactacgctggtgcgttttgatccggtgtatgtgacccacttcaagtgtgataagcaccgcatcagcgattacctgaatctgtacggttttctgcgcgatatctaccagatgccggggatcgccgaaacagtcaatttcgatcatatccgtaatcattacttccgcagccataagaccatcaaccctacggggattattagtattggtccgtggcaggatctcgatgaaccgcatggacgagatgttcgcttcggttaaaaaaaggcaccttacgaggtgcctctgataattagctaagtgcatgttgttcatgtcggatgtggcatgaacgccttatctgacatacaaaacattgtacattcaatagattgcataacccgcgcagaccagataagcgtagcgcatctggcgattttgcgcttgtcatcagtcttagcgcgccttcacggcactttattaattccttgaacgaatatttactgccatttcattcacgtctattcttaatttgctgctttaaaaacaagtgattgagcaaaattgaggcaaaaatggactggtatctgaaagtactaaaaaattatgtcggtttccggggtcgtgcgcggcgcaaagagtactggatgtttattctggtcaacatcatctttacgttcgtgctggggctgctggataaaatgttaggctggcaacgcgctggtggcgaaggcatcctgacgacaatctacggtattctggtgtttttaccgtggtgggcggttcagttccgccgcctgcacgacaccgaccgcagcgcgtggtgggcactgctattcttaatcccgtttatcggctggcttattatcatcgtctttaactgccaggcgggtacgccaggcgaaaaccgctttggaccagatccaaaactggaaccttaaaacaaatctgctcgccggatgtctgactcatccggcttttatcattatgttgatgaatgaataatttactaatgtttatttaaaatatttcaatgtcgttatataaattacctataaaaaataaccatgtatttatcttaaatatcaaaacctttataacatccgaaaaagaaagatacgaatagcatttacacaatacccggaatagactttcgtcacttttaattaaagggatgtttttatgcagtggtatttgtccgtattaaaaaattatgttggtttctctggtcgcgcacgtcgtaaagagtactggatgtttactctgattaacgccatcgtcggcgctattatcaatgtcattcaattgattttaggtctggagcttccatatctgtctatgctttatttgctggcaaccttccttcccgtccttgcgcttgctatccgtcgcttacacgataccgaccgtagtggtgcctgggccttgctcttttttgttccgtttattggctggctcgtgcttctggtttttttctgcacagaaggtacttctggcagcaatcgttacggaaacgatccgaagtttggtagtaattaatcttagaattggggcgatatttcgcccctttttattaacaataataaatattattttccgttaaaaagtttgggaatttcccgcagacaccaggatttcgcttcccccatactgtcacgacgccaggccataataatatcgatctcgctggtgctttccgggctgacgacacgcaaccgcccttccgcaatatctttttcgaccataggatacggcatcgtcgccacgccaagccccgccagtaatgcctgacgtttatcttcaatcgtgctcaccgttaagcgcggctgtttgtccagcagctgtacggtcaacaccgggcgctcacgagcggtatccgccaccgcaattccacgatatttcacacgcgtcacttcagataacggttccggctcctgatgaatcgggtgatcaggcgcggcaacgtagacgttcattaacgtatagagcttgcggctgttgatctcgctgctggaacgaaaatgcatatccggcgcgataacaatatccgcccgcccctgctccagccgttcccacgcccccgccagcacttctgtgatgattgccagttgggtattggcttttgccgccagtttgtcgattaacgggaaaaaggcaggtgtcggtaccagcgcttcggtcacaatggtgagatgcgtttcccaaccgcgcgcgagagcttccgcatcagtagtcagtttatctgcggcttccagcaaaacgcgccctcgctccaacaacatcctcccgacattggtgaatttggtacgatggccgctgcggtcaaacagcaccacatccagctcttcttccagtttttgcatggtgtagctaagtgcggaaggcacgcgtcccagctcatccgccgccgccgcaaaactgccccggcgatcgatcgcatccataacccgtagtgcttccagcgttaatgccctttctttggccatttcgttctcattcaggaaatttgaacataccgggcagaatatctggctaacaatgtagcgtccagccccttaccataaaaggaagtaaagagaggtcaagaattatgattactacccgaactgccaggcagtgtggacaagcagactacggatggttgcaggcccggtatactttttcctttggacactacttcgacccgaaattgttaggctatgcctccctgcgtgtgcttaaccaggaagtgctggccccaggtgccgcctttcagccgcgaacctatcccaaagtcgatattttaaatgtgattctggatggagaagcagagtatcgcgatagcgaaggcaatcatgttcaggccagcgccggagaggcgttgctgctctctacccagccgggtgtcagctatagcgaacacaatctcagcaaagacaaaccgttaacgcgaatgcagctttggctggacgcctgcccgcagcgagagaatccgctgattcaaaagctggcgcttaatatgggcaagcagcaattaatcgccagcccagagggtgcgatgggaagcctgcaattacgccagcaagtgtggctgcaccatatcgtgctcgacaaaggcgaaagtgcgaatttccagttgcatgggccacgcgcgtatttgcaaagcattcacgggaaatttcatgcgcttacgcatcatgaagagaaagcggcgctgacctgcggtgatggggcgtttattcgtgacgaggctaacattacgctggttgccgattccccactgcgcgctttgctgatagatttgcctgtctaattgtttttacagggagatgatgatgagtaaaaaattggccaaaaagcgccagccggtgaagcccgtggtggcgaaagaacctgctcgcaccgccaaaaattttggctatgaagagatgttgagcgagctggaagctatcgtcgcggatgctgaaacgcgtttagccgaggatgaagctaccgcgtaaagacaggttgccggatgcggcgaaaacgccttatccggcctacaaaatccaacaacattaacgaattaaacaacccgtaggccggacaagatgcgccagcatcgcatccggcacgatccccaaaacctggcgtttatctggccttgctcgccataatctcgataatctgccgatccgtttgctgcatgctatggcttgctaacgcacacaggttggcaatgctctgctcaacatcatgcgccacaatcccttcattgccggtcacggcggtatcatccagcgccattaacaccgctttccacgcagcgctagcactggtgctaaccttcatcgcgcagctgttgctcgcaccatcgcaaatcatgccgctgacatcgccgatcatactgctgatcgccatgctgatggtttcataacgcccatccaccagccatgccatcccggcggcggcccccattgctgcggtcgttgcggcacacagcgcagacaaacgcggtaactggttatggatgtaaattgcgctcaaatggctaagcatcagcgcacgcgccagccgttcatcatccgctccgaagtgttctgctaccaccaccacaggcattgttgcggtaatcccctggttaccgctgccggagttactcatagccggaagcgtagcgccgcccatacgcgcatcggatgccgcgctggtacgaatcacaatggaactagagagatctttcgccagcaaaccgcgctcgcactgtttttccagcgtcgcgccaatatgcagcccccacttaccgctcaaaccttcctggcttaacgcacaatttagcttcgcggaatcgagaataaagcggatcgccgcaaacgggacttcattgacgaacttcaggatctcagccagcgtcgttctggaaagcaccgtcagcggagactcttgctcgccctctgccacacacgcctgctgggtaaacaccacaccatcgtgcgtctcgatatgcacaatgttggtatgcccgccgacgatggtgacacacgcccacttctcaccgttccagactttggcgcgactgaagaggatttcatcgcaaggttcctggatcttaacggagactttccccgccgccagcagtgctttggcatcggcaattgcctgcgctgttgcgtctttcagcacttccagcccggcgttggcatttccacctaacgcccccagcgccgccgcaatcggcagccccaccattcccgtgccgggaacggtgacgcccagaccgttcttcatcagatttgggctaacccaggcttctacacgttcaaccggaccttccagttctgccgcagcaaccgccgccgccagcgccagactaatcggttcagtacatcccagcgccggttttacttcctcctgaacggcgaggatgtaacgctgccataacggatttaaagtgctatcaaacatattaaaaaccttaaaatttcaggtaaatcaagaaaatgccaggaacggagaaacacacagcaacaaaccagtgacgataatcaggtacagagacatccctttgtatttgtgcaatgctggtactttgtaaaccagccacgccgggatcaggcaccctaccatgccgaaaatcgggctacagatagaggtgaagctcaacaccggtgcgttcagtacgatggcgctccaggccagcaaaatggcgaaaatcatgatgccgcgctgaacgagattttcgttaatcttctcggcaggcatcttgcgacgcaggatgttcattacgatcccttgcgttgcttcgcgaaagcctaaatagacgccaaagaatgcagtcatgacagcaaagatattgagaatgacgctgaccactttcacccacgctgcgccgtcaccgctaataaactgtgcggcaatcgccagcgcggaaatattctgctcataggcttttaccgcttcgtcatgtcccatcgccagcgtgaagctcacggcgtagaaaaagacggtgacaaacaaaatgccaaacgcgatattcattgcccgcaatgctttatgccgcgccacttcaatacttttttcccggctgcgataagagatcaccatcggacttaacgtctggataaacagaatgctcgtcagggtaaacggcagcgtaataatggcgtttttcaccagcagccccagcggcggtaggctaccgacgttatacagatgccacattcccaccatgctcacgcccagcgccgcgaccaccagcagcttggtcagcaccatgccggtgctaattttgaataacaatttctcgccgcgactggagatcgccaccagaatgcaaatcagtaccagaccataaaagggactgtcactcagcaacccttccgtcacgccgaaggtatgcaggtaggaagcactatcgttggtgatggcggtggaatagacgaacatccaaatcaccagcattacgaaatagagcgcacctaacaggatgccccagtttttacctaaataaccgctaatgacgctcgggtaatctttacattctggactttctgccagcgtattaataaacaatcgctgaaacagatacattgccgggtaaccaatcacgctactgagcaaaaatacccacaatcccatcaaaccgacctgcaccgggagaaaaacaatccccgcgccaatcgccatcccgatactcataatcacccagccggtgtcagtactgtcgaatttgatcgcttctcgccactcgctctcactcattccagcacgacccgccggggtcgaagcgtctgcaatgacgcctttattcgatgcaatttccataatttctcgctcaatattttgtagggcttattatttttttccgagccgcatcaaggcgatatgcggtctacgtttttgcaggcgagttattagaataaagaaatgatacgcgcgaggtcagagaaaatcttcacaatcaagactttgaaataacggagatggataagaattttctactaaattaatcgcaggagaatattcattctctatttgcggcagatcacaaaaaaaaggtgcacatttgtgcacccaaggatgaaagctgacagcaatgtcagccgcagaccactttaatggccagtcctccgcgacttgtttcgcggtatttatcgttcatatctttgccggtttcatacatcgtctcgatcactttatcgagactaacacgcggtgcgctggtgcggcgcatcgccatccgcgcggcgtttactgctttcacggcattaatggcattacgttcaatgcacgggatttgtacctgtccggcaaccggatcgcaggtcagcccaaggttatgctccatcgcgatttccgccgcattgcatacctgcgccggactgccgcccagtagttcagttaaccctgccgccgccatactacaggccacgccaatctccccctgacagccgacttccgcgccagagatggaggcgttcattttatacagcgcgccaatagcccccgcggccagaaaatagcgggcaatactccgctcgtttaccggacgacggaacttatcgtaataagccagtactgccggaataatgccgcacgcaccgttagtcggtgccgttaccacgcgcccgccagctgcgttttcttcactaaccgccagcgcgtacatgttgatccagtcgatgacattcatcggatcgttagagatgttatcgctggaaaccagctgacgacgcagcgctacggcacggcgcggcacattgagcggaccaggcagcacgccttcagtgttcatcccacgttcaataccgtcatgcatcacttgccagatacgggcaaaaccggcgtcaatttccgctttgctgcgcagcgctagctcgttgtgcatcatcagaccagatatagacaggccgttgtaatcacacattttcagcagttcacctgcactgtggaaatcgtaaggtacggacgtttcgacatcgtggctcaggccgaagtgttcttcttcgacaataaacccgccgccgacagagtaataggttttacttaatagctcttcctgtcccttccaggcagtgatccgcattccgttctcatggcgaggcaacatttcgggatggaagataatgttctttgctacaggaaaatcaacaatatgcgcaccagatgccactggcagccgcccgctgcgcgttactaactctataaatgcagggatctcatcaatgacaacatcctgcggactgtttcctgccagtcccatgatgatggcgacatccgtggcatggcctttgcccgtcagactcaagctcccgtacagatcgaccacaatatggctcgtcgcggttaataagccgctactttccagccgatcaataaaactttttccggcattcattggccccacggtatggctactggagggaccaatcccaattttgaaaatatcgaatgcactaatcatatccacaccctcggattgccgttcagtgaagtggagcggaacgaccttacgaccgtcccgctcacgaggctttacgcactacgtactgcgatggcttcaatttccagcttcacatctttcggcaaacgcgcgacctgcacacagctccgggtcggataggtcgcctgatgctcatcgaagaactgcttatagacttcgttgatggtggcaaaatcattcagatcggtgataaacacggtcatcttgatgatatcgcccacgctcagcccggcagcaaccacgatcgctttgacgttttcgaggcttaaacgcgcctgatcttgcacatcagccgggatctcaccggtctgtgggcaaaccggtatttgcccggaggtgaagaccatgctgcctaaatcaacgccctgaacataagggccgattgcgcctggggcacgttgcgtttcgataatctttttcatacatcctccggcgtcagagcgcctgggtaaaggtacgactaataacatcctgttgctgttcacgggtcagtgcgttgaagcgcacggcgtagccagagacacggattgtcaggttaggatatttttccgggtgctcgatggcatccagcagcatttcccgattcattacgttgacgttgaggtgttgaccgccttcgacatccgcttcgtggtggaaatacccatccagcaggccgacaaggttggttttacgtactggatcttctttgcccagcgccgcaggaacgatactgaaggtgtagctgatcccatctttggcgtaggtgaacggcagtttcgccacgctcgtcaaactggccacggcacctttgcggtcacgaccatgcatcgggttagcgcccggcgcgaacggtgttccggcgcgacgaccgtccggcgtattaccggttttctggccgtacaccacgttagaagtgatagtcagaatgctctgggtagggacggcgttgcgataggttggcagcgctttaattttcttcataaagcgttcaaccaggtcgcaggcaatgctgtctacgcgctcgtcgttgttgccgtactgcggatattcaccgtcgatttcaaagtccaccgccaggccgttttcgtcacggattggtttcacgcgggcatatttgatggcagacagggagtccgtcgccacgctcaggcccgcgatgccgcatgccatagtgcgatagacatcacgatcgtgcagcgccatcaggctagcttcgtagctgtacttgtcgtgcatgtagtgaatgatattcagcgcgctgatgtactgcaccgccagccagtccatgaagtgatcgaggctgtccatcactttgtcgtaatccagcacgtcgtccatcagcggtgctgttttcggcccgacctgaatcttcagcttctcgtccaccccgccgttaattgcgtagagcagcgttttcgccaggttagcgcgtgcaccaaagaactgcatttgcttaccaatcaccattgggctgacgcagcaggcaatcgcgtaatcgtcgctgttgaagtcagtacgcatcagatcgtcattttcatactgcaaggaagaggtgacgatgctcacctgcgcggcatattttttgaaggcaatcggtaattcttcgctccaaagaatggtcaggttaggttccggtgccggccccatagtgtgcagggtgtgcaaatagcggaaggagtttttggtcaccagcgtacgaccgtccagccccatcccgccgatcacttccgtcgcccagattgggtcgccggagaacaggctatcaaattccggtgtacgcaggaagcgtaccatacggatcttcatgatgaagtgatcgatcagttcctgtgcctgctgctcattgagtacgccagctttaaagtcgcgctcaatgtagatatcgaggaagcttgccgtgcggcccaggctcatcgcgccgccattttggcttttcactgccgccagataagcgaagtagagccactgcaccgcttcctgcgcattctgcgccgggcgagagatatcaaagccatatttcgccgccatttcctgaatctgcaacagcgcatgacgatgctctgccagctcctcacgcagacggatggtggcttccagatcctcgcctttttccagacgagactggagatcggcaaattgcagttcgcgttcacgtaccagataactgatgccatacagcgctacgcggcgatagtcaccgataatgcgcccacggccatagccatctggtaaaccggtcagcacgccagatttacggcagcgcagcatatccggactgtaaacatcaaatacgccctggttatgggttttacgcagatcggtaaacagatattcaaattcactgtccatttctcggccataggcgtggaaactacttttaatcatattaatgccaccgaacgggtgtagcgcacgtttcaacggcgcatccgtttgcaggccaacaattttttccagcggctggttaatatatcccgcatcatgagcggtaattgtggtggcaatattggtatcgaaatcaaccggcgcgtgggttgcattttcgatacggatgccttccattactttttcccacaattccgtggtggcaggcgtcgcttcggcgaggaaagattcatcgccttcatacggtgtatagttatgttgaataaaatcgcggacattaatttcgtttttccagtccgtacctttaaagccaagccatgcgtcggcgtacagcttatcgctggtatcaatatctaccttcatgaaaaataatctctctacaatacttcaactaaattatgcaaattctgcgggcgcgttaactttgcctaaatgaatggcatccaaagcaatcattttttcttcgttagtcggaataacggcacaaatgacacgcgcattttcactggaaacaattcgctcaccacaggagttagagcgattattcatttctgtatcaatctctaagcctaatacagccaaatgttccatgaccagacgacgaattaagctactattctctcctattccgccggtgaatataattccatccaggcgacgtaaactagctgcgtgtccggcaatatgacgggcaattcggtgaacaaaggttttaattgccagttgcgcgcgttcgtgaccttcatgccaggctttttccagaacacgtaaatcgctagaaagaccggaaatacctaataatccgctctctttattcactacgcgttccaggtcacccaggctctggttggtttggctggcgacccaggacatcgcaccaaagtcgacatcgccactgcgggtacccatcatcaagccttccagcggcgtcattcccatactggtatcaacactctgaccgttgcgaaccgcgcagatactcgcgccattgccaagatgcgccacaaccaggccggagtcatcttccgccagattcagcaggctatgtgcgcgctgggaaacatagcggtggctcgtgccgtggaaaccataacggcgtacacctaactcttcataatatttccacggcaggccgtataaataagcttccggagccatcgtctggtggaaactggtatcaaataccgccacctgagttacgcccggaaataattgctgcgcgctttcaataccacttaaattggcgtaattatgcaggggtgccagtggagaaacgcgacggatattatcaatgacttcatcggtaataatggcggactcggtaaaaatactgccgccgtgagcgatgcggtggccaattaaggccacactgtcatttaaattccgtttttccagttcaaatgcaattgccttcaatgcaccttcgtagctgtggtgagccagcggtgctggctctcccccatttacggataagaatgcattttcgctgttaataccgtcggcaataccactcattaatacttcacagtcgctggcatcgagcacggaaaacttaatgctagagctaccacagttaataaccaaaacaaccggaaattcattcatctcttttctcatcctgagttacggattaaaacagtttgtatacgatgttcaggatggtcagcagaccaatcacggtaacaaacacgttatccagacgaccacggtatttcgccagagacggcgctttacggatggcatacatcggcaacaggcacagcagggatgcgataatcggtgcgcccatggcttcaatcaggtcaaggatgttcgggttggcgtaggcaacaacccaggtggagcccatgatgaagatcatgctgatagtgttcagtttacccaggctcactttagttttgtcgcctttataaccaaacttcaggaccaggccattcagaccttccagcgttcccagatagtgaccgaagaaagatttgaagatagccacgagtgcgatgatggaagccgcatattccagtgtaatcgcgaacgttgttttggtaccggtcatggacgcaaagtggttagccagataagaaagcactggaatattctgcgctttggcttccgccatgttggccggagacagagtaaacaggcagctaaaggcaaagaacatcaccactgcaaccatcagcatgctggcacgagaaatgatttgggaacatttacgttcggtgaagtcgcgaccgaagtctttctcatactcttcacgcttagaaaccacgaaggaagagacgattgggctgaagttaaaggagaaaaccatgatggaaatccccagccagacagtgatcaggataccgtcatgaccggttaagctcaggctaccgaggtcaacctggtcgataactgcagagttccagtaagggatcaggctcaaagaaatcagcaccaggctggcgataaacggccataccaggtagctcatcactttaaccatcagatccttaccaaaccagatgacgaaagccatcagcagcaacaggaacagcgccacaaagccgcgattcagcggtgcaaagccgagctggttttcccagaacgtcataaaggtattggtaatagtaacgccataaatccacagcagtgggcaaatcgcgaagaagtacaggaacgtgataaccacgccgccagttttaccaaaatgctcttccaccgtttccgtaatgttgccggaagggttagagccagaaagacacagacgcgccagcgcccggtggcaataaaacgcgatggggtatgccaataccaacatcagaagaatcgggatcagtccgccaaaacctgcgcggatagggaagaacagcaccccggcgccgattgccgtaccaaacaagcctaacgtccatgtggtatcacttttacgccaggagctttgttttgtctggctggatacaatgctatcactagtactcatatcctatcctcaacgaattaattaagcgtcaacgaaaccggtgatttgagagacgcgagaaagatcgatattgccgccggaaataatactgacggtttttctgttttgaatatattggtctaatttaccgcttaataatgcagcacatgccagagcgcctgcgccttcggtgacgactttattgcgctgaattaaggcaatcatactgtttctgatttcgtcttcgctgaccagcacgatgtcatcgactaattcacgaacgatttcgtaagttaaattacccgggcgggagacatcacaaccatccgccagggtgccggtagttcggtgcgtggttatttctccggagtggaaagaagccgccatgccgtgaacgttttcagactgtacgccaataacacgaatggtcgggttaatagatttaattgccaccgcaataccagcaattaaaccgccaccaccaattggcacaatcacgttatcgacatcatagagatcttccataatttccagaccaatcgttccctggccagcaatcactttcggatcatcgtaaggtgggataaaaatacggccttccatttcgacaatttcgctcactttagcgatagtgtcgttgaagttatcaccatgcagaacgacttctgcggagtagtcgcacgttgccgctactttggattttggcgcaccttttggcatcaccactttaccgtcgatacccagcatcgcgcaggagagggaaaccccttgcgcatggttgcccgcagaacaggccaccacgcctttgcgtttttccgcatcggtcagactacttaatttattaaatgcgccacgaattttaaaactacccgtacgctgcatattttcaaacttcaggaatatttcacctttgcaacgttcactaaaatagttggagcgaggcatgcctgttttataaattcgcccagccagtcgttgtttcgcttcaataatgtcatcaatagcaaccggcagatcgtatgtaatatgcattataaaacctcttcgcctgaattaaatatgtaggtaaccgtaaccgacacctgcaagacagacaggtggattatttatgtttaaataaaaacaaataattaaccaacttctattaattgccttcgtctacacccattataagaactatactctttggctaattccaccaaaacgcttgctgcttttttaatacgataatttttgctccataccgcggcatattgtgccacaggtaatgtttcttcaaccggaatagtaataaattgattagaaccaaaaggactcgtcatatcacaaggaattacagttaagaaatcagcattgagaacaagattataaattgtcacgacactgtcggttttaacgatgttttcaatactgatgccatttctttgtaacgtagtaagcagttcgctgtagtaccccatattagtttgtggcaacacccactgttcgttcttcaagctctccagcgtggtggtgccggtgcatgttcgggacttactggctaccagcacaaactcggactcgaacagcggctcaacatgtaaatcctgaagcttcatttctgcacttaacgtaccaatcgcaaaatccagtcgaccgtcgcggattgccggtaagaagctagacagttgcgcttcatacatagaaacctgcgctttcgggaacacctctttgaacttgttgatcatcccactcataaaagtaaaaccaatcaaactaggaaaaccaaaactgacttccaccaccgcctcagaagacataccgcttatctcattaaccatatttttcatttcacgggtaatggattcggaacgggagagtaacaattgaccggcaggtgttaatgttacaccggtatttttccgcaccactaattccacaccaaaataatcttcaatatcgttaatgattttactgacggccggttgagttaaccctaattcttttgcagcgctgccgatagaaccacttctaatgacttcctgaaagactaccaggtgctgcgttttcggaagaagaatagtgctcataacgacctacgttaattacctcattgacggcatgaagtgtatcaaaatgaaatgaacaggatatgtgcgaccactcacaaattaactttcaatactttccagagtatcgttattacaattaaatacctttaaatatcaacaagttaaagtataaaaatcagcataaaccctgatttttgtcaaaaaaaatgacggggataaccatattttatggcgataacatcattcgttatgtggttaatacaaaaaaggggctgagaccatatttcaagcaattaccggataattaccaggcaaaatttgagttaaatttaatgagcaagttcagtaattttattataaataaaccatttagtgtgataaataatgcggcatgtcacatttttagtcgctatttgttggagaacaaacatttattttatcaatattttaaaattagcaatacatgtattgatcatctcgaacaattgattaacgtcaactttttctcttctgacaggacgagtttttgtgaatgcaatcgttttccataaattcttctcccctcataggcgacgaatagcattttgtgttgaggatcacaaaacgaataattgctgatcgccgcgataaggtcagacaaagacaacaagggaaattttcacagagcttttgatcggcgtaggccacagaatgttgcttcgtttactgtaacgccgggtaaatgagcgttttttgatagtgcgaaagaaccctgcgaggaaaataagcatctattattgtttgtcatgatgacaaggcaggcatcaatgaaaggcttcccaattgcgcatatttttcaccctagtatcccgccaatgcacgcagtggttaacaatcacaatagaaatattgattattggacggtaaaaagaaagtttgcagaaattgtctccaccaatgacgttaataaaatttacagtataagtaatgaactgcggagagtattatctgcaataactgcattgaatttctatcatggcgatgttccttctgtcatgatccgaatccaaccggaaaatatgagtccattcattatagatatttctacaggagaacatgatgattatatcatacaaacattagatgtaggcacttttgcaccttttggtgaacaatgtacttgcagtgccgtcaataaaaaagagctggaatgtattaaggagacgatttctaagtattgtgcaaaattcacccgaaaagaagccatcttaaccccccttgtgcactttaataaaaccagcattactagtgattgttggcaaattctcttttttagtcccgatcattttaataatgatttttattgattatttataaaggataaaataatgttccctgttagtagtattggtaatgatattagtagtgatttagtccgtcgaaaaatgaatgaccttcctgaaagcccaacaggaaataacctcgaagcactagcaccaggtatagaaaaactaaaacagacctctattgaaatggtcactttacttaacacgttacaacctggtggaaaatgcattatcactggtgattttcaaaaagaattagcgtacttacaaaatgtaattctttataatgtcagctctcttcgtctggattttttaggttataacgcccaaattattcaacgaagcgacaatacttgtgaacttaccattaatgaaccgttaaaaaaccaggaaatatccacaggtaatatcaatattaattgcccattaaaagatatttacaatgaaatcaggaggttaaacgtaatttttagttgtgggactggagatatcgttgatctatcctctctggacttacgtaatgtcgatttagattattatgatttcacagataaacatatggctaatactattttaaatccttttaaattgaatagtacaaattttactaatgccaacatgtttcaggttaattttgttagtagtacacaaaacgccacaatctcctgggattatttactaaaaataacgcctgttttaataagcattagcgatatgtattctgaagaaaaaatcaagtttgtcgaaagttgtttaaatgagcctggagacattaccgaagaacaattaaaaattatgagatttgcaattataaaatctataccaagggcaactcttacagataaattagaaaatgaattaacaaaagaaatatataaaagcagtagcaaaatcatcaattgcttgaacagaattaaattaacagagatgaaagaattcagtagtgaaaaaatatatgattacatcgatataatcattgaagattatgaaaataccaaagaaaatgcttatctggtcgtcccccaaattaattatactatggatttaaacatagaagactctagcagtgaagagttacttagtgataataccctcgagaaagacgaaaattctccggacaatggctttgaggtcggggaatataacacatatgaagcatataacagtgagaagcaatattttaccagagaggactatacgtatgattacgaccttttaaatgcaatataaacttaataacttcttacaaagtctattattaataccgtagatatttattcatcttaccctgtgcaccaaaagcaaaaactcactgacgcgggtttgaaactgatggcaaccgcaaaaatgcctgatgcgctacgcttatcaggcctacgccatctctgcaatatattgaatttgcgtgcttttgtaggcaggataaggcgttcacgccgcatccggcatgaataaagcgcactcaacaatctgaaacccgccggaacggtttattacgtacatcaggtaaaactgaccgataagccgctttcttttgggtatagtgtcgtggacagtcattcatctttctgcccctccaaaagtaaaaacccgccgaagcgggtttttacgtaaaacaggtgaaactgaccgataagccgctttcttttgggtatagtgtcgtggacagtcattcatctttctgcccctccaaaagcaaaaacccgccgaagcgggtttttacgtaaaccaggtgaaactgaccgataagccgctttcttttgggtatagcgtcgtggacagtcattcatctttctgcccctccaaaagcaaaaacccgccgaagcgggtttttacgtaaatcaggtgaaactgaccgataagccgggttctgtcgtggacagtcattcatctaggccagcaatcgctcactggctcaagcagcctacccgggttcagtacgggccgtaccttatgaacccctatttggccttgctccgggtggagtttaccgtgccacggactgttaccagccgcgcggtgcgctcttaccgcaccctttcacccttacctgatcccgcttgcgcgggccatcggcggtttgctctctgttgcactggtcgtgggtttcccccccaggcgttacctggcaccctgccctatggagcccggactttcctcccctccgcccgtctcccccgaagaggacgacgacgaagcggcgactgtctggtcagcttcggcgcgcagtatagagggtttgcgcgcccttgtcaccccgcgttgcgcattccaatcgccagtgtcgcggcgatattacgactagcacggcagatattgtcataagccccgcggaatgcttcgtccaacgtacctatgctggtcaatacgctgaagaccgcatcaatgccatgctgatgtacaacgccaacatcatcggtcaggctacccgcaatgccaatcaccggtttatggtacttcttcgccacgtttgcgacaccaatcggtaccttcccgtgaatactctggctgtcaatacgcccttcaccggtgatcaccagcgtacaatcgtgaatatgttcctccagattcagcgccgtagtgacgatttcaataccacttttcagttccgcaccaagaaacgccattagcgccgcgcccataccacccgcagctcctgcaccggggacatctttcacatcaacatgcagcgcttttttaatgacctcggcatagtgagagaggttattgtccagctcaacaatcatcgcttcactggctcccttttgtgggccaaagatgcggcttgcgccgttatcgcccaccagcggattggtgacatcacaagcgacgcgaatgacgcaatcttttaagcgcggatcgaggccggaaatatcaatatcattcagagtattaagactaccgccgccaaaaccaatttcattgccgttggcgtcgcataatttcgcccccagcgcctgtaccatgcctgcgccgccatcatttgtagcgctgccgccaatgccgataataatgtttgtcgcaccgctctccagcgcctgcaggattaactcgcctgtgccgcgactagtggtcacgagtggatcgcgtttttccgcaggtaccagctccagcccactggccgccgccatttcaataaacgcggttttgccatcgccggagatcccccaactggcattcactttctcgcccagcggccctgtaacccaggcgtgacgttcagccccctgggtggctgcaatcatcgcttccaccgttccttcgccaccgtcggcaaccggaacagaaacgtactgtgcatcaggaaaaatttcccgaaatcctttttctatcgcctgcgcaacctcgctggcagataaactttctttataagagtctggggcgattacgattttcatacctatgcctgttaccacatgacgccggagggcgtttctcttattcggcctggattccaggcccggattgcaatacgccatccgggcacgacgtcattaacgagtaacttcgactttcgccagtttttcgtagtagcacgccagggcgctatgatccgccgttcctaaaccatctgctcgcagtgcctgcatcatctccataaccgcagctgtgagcggcagttgtgcgccgacgccgtgagaagtatccagcgcattcgccagatccttaatatgcagatcaatacggaagcccggcttgaagttgcggtccatcaccatcggcgctttggcatccagcacggtactgcccgccagtccaccgcgaattgcctgataaaccaggtccgggttaacgcccgctttagttgccagcgttaacgcttcactcatcgcggcaatattcagcgccacaatgacctgatttgccagtttggtgacgttacctgcaccgatttccccggtatgcaccacggaacccgccatcgctttcatcaaatcatagtatttgtcgaaaatagccttgtcgccgcccaccatcacactcagcgtaccgtcgatggctttcggttcaccgccgctcaccggagcatccagcatatcaatgcctttcgctttcagcgcttcgctgatttcacggcttgccagcggtgcgatagaactcatatcgatcaataccgtacctggcttcgcgccttcaataatgccattctcacccagcgccacctctttcacatgaggggagtttggcagcatggttatgatgacgtcgcactgttcagcgatcgctttagccgtagacgctgtttctgcacctgcagcaatcacgtcagcaatagcttctgggttacggtcagcaaccaccaggctgtaacctgctttcagaaggtttttactcattggtttacccataatccccaggccaataaaaccaactttcatagtcatatcaatcatctctcttgttgcggtggtggttattttttaaaggtatcagccagtttctgagtggcagagcggaagacgccgagatcgctgccgacagccacaaacgtcgcgccccattccagataacgacgcgcatcggcttcgaccggcgcgaggataccgctgggtttgccgtgcgcgctggcacggttaaaaatgtgctgaattgctttttgtacatccgggtgacttgcattgccgagatggcctaatgccgcggccagatcgctggggccgacgaagatgccgtctacgccttcggtagcggcaatggcatcgacgttatctacgccctgctgactttctatctggaccagaatagtgatgttcttgttgctctgagcgaaataatccgccacggtgccaaacatattggcgcggtgagaaacggagacgccgcgaatgccttccggtgggtaacgggtacttgccaccgccagctctgcttcctcttttgtttctacaaaaggaatcaggaagttatagaaaccgatatccagaagacgcttaataattaccggctcgttggtcggcactcgcactactggcgcgctggcgctgcctttcaaggccattaactgcggaataaacgtggagatatcgtttggcgcatgttcgccatccagcaccagccagtcaaacccagccaaaccaagaacttcagtgctaatcgggttagagagtgcactccagcaaccaatttgtacctgtttcgcagccagtgcggctttgaatttattcgggaaaacatcgttattcatcgcttatacctttgcttatttctgcaattccatacgtttaatgtcgccaactacgaagaggtagcagaccatcgccatcagcgcactacatcccacgaaaaccagtgctgcattgaaggagtgcagttcacttaccaggtagccaatcaccagtggagtgacaatggaggcaacattgccaaagacgttaaagacgccgccgcagaggccaacaatctctttcggcgcggtgtcagaaatcaccggccagcccagcgcaccaaatcctttgccaaagaaagccagcgccatcagcatgaccaccagcgtggtgttgttggtgtagttacataagatgatggtggaagccagcaacattcccagcacaatcggtagcttacgtgccagggtcagggataaaccgcgtttgatcagataatcgctgaagacacctcccagcacgccgcccgcaaaaccacacagtgctggaatgctggcgaccagacccactttcagaatgctcatgcctttttcctgcaccagataaatcgggaaccaggtgaggaagaaccaggtgatggtgttgataaaatattgtccgaaaaatacgcccagcatcatgcggttagagagcaattgcttgatgtaatgcagtttgggtccgcttgctgccgcactgcccggctttttgtggtccatatcgaccaccgcgccattttcagagataaacttcagctcttccgcagacatacgtgggtgatctgtcgggttatgaatcaacttgatccacagcgccgtcagcacaaaaccaatcacccccataacggtaaagacgtgctcccagccccaggcgaaagtcagccagccaagcagcgggctaaagagcgccaggctgaaatattgcgcgctgttaaagatggcggaggcagtaccacgttctttcgtcgggaaccaggcggcgacaattcgggcgttcgccgggaaacttggcgcttcgctgaagccgagcataaagcgcataaagaacatggagatccctgcccaggccagcgggaacatatcaacaaagccttgcaggaaggtgaataggctccagaaaaagaggctgtaggtgtaaacttttttgctgccaaacttatcaagcagccagccgccggggatttgcatcagcaagtaggcccagccaaaagcggagaagatgtaacccatgctaaccgcacttaactgcaactcttttgccacttcggtaccagcaatagacagcgttgcacgatcggcgtagttaacggcggtaacaataaaaataatcagtaatattaaatagcgggtatgcacgcctttctttttttcgtcaacggtgtccagaatcattttatttacctcgggtacttatgctgatttttattattatggggaaggtgttatttatgagtttcatttatgccgtaacgacaatgaactcgggaattagtataagcagcgcgagaataataatcattgtgcaaatgctaatttaattaatactatttaaatattattttgagcatatgcacataaggttgcgcgctaaagcacagatttgcgctttaccttaccgggcggcactgcaatccctgaaatgattgacattgatcacatttctgcgtttaaactcctgacattcttatttcacccaatgaagtcatttatttttaaatgagaccaggtcctcattttaataacccctggctggagaatattgcacaatggccaacatcgaaatcagacaagaaacgccaactgcgttttatataaaagttcacgacacagataatgtggcaattattgttaatgataatggcctgaaagcaggaacgcgttttccggatgggctggaattaattgaacatattccccaggggcataaagtcgcattgctggacattccggctaatggtgaaattattcgttatggcgaagtgattggttacgccgtgcgtgcaatcccacgcggaagctggatcgacgaaagcatggttgtactaccggaagcgccgccgttacacacgctgccactggcaaccaaagtcccggaacccttaccgccgctggaaggatacacctttgagggctatcgcaatgccgatggcagcgtgggcaccaaaaacctgctcggtatcaccaccagcgtccactgtgtggcaggcgtggtggactatgtagtaaaaatcattgaacgcgatctgctaccgaaatacccgaacgtcgatggcgtggtggggctgaatcatttgtacggttgtggcgtggcgattaacgcaccggcggcagttgtacctatccgtaccattcacaatattagcctgaatcctaactttggcggcgaagtaatggtgattggcctgggttgtgaaaagttgcagcctgagcgcctgctgactggaacggatgatgtgcaagctattccagtagaaagcgccagcattgtcagtttgcaggatgaaaagcatgtcggttttcagtccatggtcgaggatattttgcagatcgccgaacgccatctacaaaaactgaatcaacggcagcgagaaacctgcccggctagtgaactggtcgttggtatgcagtgcggtggcagcgatgcgttttctggtgtaacggcaaacccggcggttggctatgcgtctgatctactggtgcgctgcggcgcaacggtgatgtttagtgaagtaacggaagtgcgtgacgcgatccatctgctgacaccacgcgcagtgaacgaagaggtcggcaaacggctgctggaggagatggagtggtacgataactatctcaatatgggaaaaaccgaccgcagcgccaaccctagcccgggcaacaagaaaggcggtctggcaaacgtggtagagaaggcactcggctccattgctaaaagcggtaaaagcgcaattgttgaagtgctgagccccggtcaacgcccgactaaacgcggattaatttacgccgcgacgccagccagcgattttgtctgtggcacgcaacaggtggctagcggtatcacagtgcaagtgtttacgaccggtcgtggtacgccgtacggcctgatggcggtacccgtcattaaaatggcaacccgcaccgagctggcgaaccgctggtttgatttaatggatattaatgcgggcaccatcgctaccggcgaagaaactattgaagaggtgggctggaagttgttccactttattctcgacgtcgccagcgggaagaagaaaaccttcagcgatcaatgggggctgcataaccagctggcggtgtttaacccggcaccggtgacctgatttcttttggaacgtccctcgcaaaacatggccttagtgccatgtttttattgtttaaagcccccacgtccattaataatgcatttgcattaccttagttcaagcttataatttgagcagaaaacaggctgtaaaaggacagtgaatcatgcccgctaatgctcgctctcacgctgtactgaccactgaaagtaaggtcacgatacgcggacaaacaactatccccgcgccagtgcgtgaggccttaaaactgaagccaggccaggacagcattcattacgaaattctgcctggtgggcaagtatttatgtgccgactgggagatgaacaggaggatcatactatgaatgcatttttgcgttttctggatgcagatatccagaacaacccgcaaaaaactcgtccattcaacattcaacaaggaaagaaacttgtcgctggcatggacgtcaacattgatgatgagattggcgacgacgaataatggattttccacaaagggttaatggttgggcgctatatgctcatccctgttttcaggaaacctacgacgctttagttgccgaagtcgagacattaaagggaaaagatcctgaaaattatcagagaaaagccgccacaaagttattggcggtagtccataaagtgattgaggagcatatcacggtcaatccaagtagtccggcattccgtcatggcaagagcttaggctctgggaaaaataaagactggagtcgggtaaaatttggtgctggtcgttatcgtctcttctttcgttatagtgaaaaagagaaagtcatcattctgggatggatgaacgatgaaaacactctgcgcacctacggtaaaaaaacagatgcctataccgtattcagcaaaatgttaaaaagaggacatcctcctgccgactgggaaaccctcacccgagaaacagaagaaacccattgatggtgttcacaatgcccgccgaacgcattcgtgttgaccagcgggcatcctttctcactccccgaccagaatcacttcaaccccagcctttcgcagtccttccaggctatccgcaggaatgccttcatcaacaatgatcatgtcgatacgttgagtatcaatgatcttatgtaaactggaacgattgaacttactggaatcggtgaccacgatgatccgttccgcaacttcgcacatccgacggtttaaacgagcttcatcttcattatgtgtgctgacgccgcgctccagatcgatcgcatctacaccaagaaacagcatatcgaagtggtaattttgcaggctttgctcagcctgatcgccgtaaaaagattggctctgacggcgcaaatgcccgccggtcatcagcagctcaacgccttccgcttccagcaacgcattagccacgttcataccgttggtcatcgcaattacgtcagtgtgcttgcgcatcagacgagcaatctcaaaagtggtggtcccggaatcgaggataacccgatgacctggctgaatcaactcaacggcagctttcgcaacgctgcgtttcatcgcggtgttcagtgcgcttttatcttccacacttggctcgacactcggcgtcgtgctatcgcagatcaacgcgccaccataggcacgcacagcgatcccctgcttttccagaaacgccagatcgttgcggatcgtcacagtagatacgccatacaatgcgctcagatcgttaacctgcacactcccttgctgtcgcagacgctgaatgatctgttctcgtcgctcgctggtgccagtcactcgcttctcaccactagcgtcggtattactcatagtaagtcctttcgtaaaactttcgtttcatttcgttttgcctattaacgcctttctattaagcaaatgcaagcccaccttgcccattgacgcaagctactctcgtttcagtgactttcattatgtttcttttgtgaatcagatcagaaaaccattatctttcgttttatttttatctcaccatgacgcagtatcaactgaaacaaaacgaaagattaatatcgcagtaatctgaactggagaggaaagtgaaacatctgacagaaatggtgagacagcacaaagcgggcaaaacaaatggaatttatgccgtttgttccgcacatccgctggtgctggaagctgcaatccgctacgccagtgcaaaccaaacgccgttactgattgaagcaacctccaatcaggtagaccagttcggcggttataccggaatgacgcccgccgattttcgcggctttgtttgtcagctcgccgacagcttgaatttcccgcaggatgcgttgattctgggtggtgaccatctggggccaaaccgctggcaaaacctgccggccgctcaggcaatggccaatgccgatgatttgattaaaagctacgttgcggcaggattcaaaaaaatccaccttgattgcagcatgtcctgtcaggacgatccgattcccttaactgatgacatcgtggctgaacgcgccgcccgtctggcgaaagtggcggaagaaacctgtcttgaacactttggcgaagccgatctggagtatgtcattggtaccgaagtgccggtacctggcggcgcgcatgaaaccttaagcgagctggcggtcaccacgccggatgccgcccgcgccacgctggaagcccatcgtcacgcctttgaaaagcaaggtttgaatgccatctggccacgcatcattgccctggtggttcaacccggcgtcgaattcgatcacaccaacgttattgattatcagcccgccaaagcgagcgccttaagccagatggtcgaaaactacgaaacgctgattttcgaagcgcactctaccgattatcaaacgccgcaaagcctgcgccagctggtgattgaccactttgccattctgaaagttggcccagcgctgaccttcgccctgcgtgaagctctgttctctctggcggcgattgaagaagaactggtgccagcgaaagcctgttctggtctgcgtcaggtgctggaagacgtgatgctcgaccgcccggaatactggcaaagccactaccacggtgacggcaacgcgcgtcgtctggcgcgtggttatagctacagcgatcgcgtgcgctattactggccggacagccagattgatgacgctttcgctcatctggtacgtaatctggcggatagtccaattccgctgccgctgatcagccagtatctgccgctgcagtacgtgaaagttcgctccggcgagctgcagccaacgccacgggaactcattatcaaccatattcaggacatcctggcgcagtaccacacagcctgtgaaggccaataagcaaaacaaagaggaacacgctatgccaaatattgttttaagccggattgatgaacgcttgattcacggtcaggtcggcgttcaatgggtcggatttgcgggggcaaatctggtgctggtagccaacgatgaggttgccgaagatccggtacaacaaaacctgatggaaatggtactggcagaagggatcgccgtacgtttctggacgctgcaaaaagttatcgacaacattcatcgcgccgccgatcgacagaaaatcctgctggtttgtaaaacacccgccgatttcctgacgctggtgaaaggtggcgttccggtgaatcgcattaacgttggcaatatgcactacgccaatggcaaacaacaaatcgccaaaacggtttctgtggatgcgggcgatatcgcagcatttaacgacctgaaaaccgctggggtggaatgcttcgttcagggcgtcccgacagagcctgctgtggacctctttaaattactttgagggattcatcatggaaatcagcctgttgcaggcatttgcgttgggcattatcgcctttatcgctggcctggatatgtttaacggcctaacccatatgcaccgcccggtggtcctcggcccgttggtcgggctggtacttggcgatctgcataccggaattttaaccggcggtacgctggaactggtgtggatggggctggccccgctggcgggcgcacagccgcctaacgtgattatcggtactatcgtcggcacggcgtttgccattactactggcgtgaaacccgatgtcgcagtaggtgtcgccgtacctttcgctgtcgcagtacagatggggattaccttcctgttcagcgtgatgtccggcgtgatgtctcgctgcgacctggcaacaaacccgcgccgcatttgatgctggtgccgacggcctggtgcattgctataacgggatgacaggtttacatcaccgcgaaccgggaatggttggcgcgggattaacggacaagcgcgcctggctggaactgatagccgatggtcatcatgtgcatccggcggcaatgagcctgtgttgttgctgtgcgaaagagagaatcgtactgatcaccgacgcgatgcaggcagctgggatgccggatggtcgctatacgttatgtggtgaagaagtgcagatgcacggtggcgttgtccgtaccgcgtctggtgggctggcgggcagtacgctgtctgttgatgcggcagtgcgcaatatggtcgagttgacgggcgtaacgcctgcggaagccatccatatggcgagcctgcatccggcgcgaatgctgggtgttgatggtgttctgggaagccttaaaccgggcaaacgcgccagcgtcgttgcgctggatagcgggctacatgtgcaacaaatctggattcagggtcaattagctagcttttgatagtttgctcctttattgggccttcacttcccccgtaaggcctttctttttctttcgttttgatctgtgcagcggtgtcggatgcgacgctaacgcgtcttatccgacctacagttggtgaccgcaaggccggataaagcgtttgcgccgcatccagcaatcccttttgcttcctttatcttttctttcaacgatcacaaatttcgttttatttcttttttctccattgaactttcagtttcttttctatagattttaatcaacgaaagacatcaccaagtgaaatgaaacgaaaggcaagtgaaagcgacaacgcccgacgtcaagttcatcagactaaggattgagttatgccagaaaattacacccctgctgccgccgcaaccggtacatggactgaagaagagatccgccatcagcctcgcgcatggatccgtagtctcaccaacatcgacgcgctacgttccgcgctcaataacttccttgaaccgttactgcgcaaagagaatctgcggatcatcctgaccggagccggaacgagcgcatttatcggtgacatcatcgcgccgtggctcgccagccataccggtaaaaacttcagcgccgtaccgaccaccgatctggtcaccaatccgatggactacctgaacccagctcatccgctgctgttgatctccttcggtcgatccggcaacagcccggaaagcgtcgcagccgtggaactggcaaatcaatttgtaccggaatgctatcacctgccgatcacctgcaacgaagcgggcgctctttaccaaaacgcgatcaacagcgataacgcgtttgccctgctgatgcccgcagaaacgcacgatcgcggctttgcgatgaccagcagcattaccaccatgatggccagctgcctcgcggttttcgcacctgagacgatcaacagccaaaccttccgcgacgtggcggatcgttgccaggcgatcctgaccagtctgggcgatttcagcgaaggtgtgtttggttacgcaccgtggaaacggatcgtttatctcggtagcggtggcttacagggcgcagcacgcgagagcgcgctgaaagtgctggaactgacggcgggtaaactggcggccttttatgattctccaaccggattccgtcatggaccaaaaagcctggtcgatgacgaaacgctggtggtggtatttgtctccagccacccttacacccgtcagtatgatcttgatctgctggctgaacttcgccgtgacaaccaggcaatgcgtgtaatcgccatcgccgcggaaagcagcgacatcgtcgctgccggtccacatatcatcctgccaccgagtcgtcactttatcgacgttgagcaggcattttgcttcctgatgtacgcccagacgtttgcactgatgcagagcctgcacatgggcaatacgccggataccccaagtgccagtggcaccgttaaccgcgtggtgcaaggcgtaatcattcatccgtggcaggcataagaggatcgcattatgagcattatctccactaaatatctgttacaggacgcccaggccaatggctacgcggtgcctgcttttaacattcataacgccgagacgatccaagcgatcctcgaagtgtgcagtgaaatgcgaagcccggtgatcctcgccggaacgccggggacctttaaacacatcgcgctggaagagatctacgccctgtgtagcgcctattccacaacctacaacatgccactggcgctgcatctcgaccaccacgaaagcctggatgatattcgccgtaaagtccacgcaggtgtgcgcagtgcgatgatcgacggcagccacttcccgtttgccgagaacgtgaagctggtgaaaagcgttgttgacttctgccacagtcaagattgcagcgtggaagcagaactgggccgcctgggcggtgttgaagatgacatgagcgttgacgccgaaagtgcattcctgaccgatccacaagaagctaaacgctttgtcgaactgactggcgtcgacagcctggcggtagcgattggtacggcgcacggcttatacagcaaaacgccgaagattgatttccagcggctggcggaaattcgtgaagtggtggatgttcctctggtgctgcatggtgccagcgatgttccggatgaatttgtccgtcgcactattgaacttggcgtcacaaaagtgaacgttgccacagaattaaaaatagccttcgctggcgcggttaaagcctggtttgcggaaaatccgcagggtaacgatcctcgttattatatgcgcgtcggaatggatgcgatgaaagaagttgtcagaaataaaattaatgtctgtggtagtgcgaatcgaattagtgcataatcattagttttttatgatttatcccaatgtacttcccgattaatatcggggagtgccttaatggaaaaggagataactaaaccttaataaatacatcactacaatatcgcaacaataatatatttaaaaaaattatattattcaactttatggtgaggattacacaatgaccagtccaaatattctcttaacccgtattgataaccgtctggttcacggtcaggttggcgtgacctggacatccaccatcggtgcaaatctgctggtagtcgtggatgatgttgtcgctaacgatgatattcaacagaaattaatgggtattaccgcggaaacctacggctttggcattcgtttctttactatcgaaaaaaccattaacgtcatcggcaaagctgcaccacatcagaagatcttcctgatttgccgtacgccacaaacggtacgtaaattggtagaaggtggtattgacctgaaagatgtcaacgtcggcaatatgcatttcagcgaagggaaaaagcaaatcagcagtaaagtttatgtcgatgaccaggatctcacggacttacgttttattaaacaacgtggcgtgaatgttttcattcaggacgtccctggcgatcaaaaagaacaaatccctgactaaatctaaaatcgccttaatattggtttgaggtaataaaaatgcatgaaataaccctacttcagggattatccctggcggcgttagtttttgttctggggattgatttttggctggaagccttatttttattccgcccgataatcgtttgtaccctaactggcgctattctcggtgatattcagactggcttaattaccggtggtctgacagagttggctttcgccggattaacccctgcaggtggtgttcagccgcccaacccgattatggcgggtctgatgaccaccgtcattgcatggtctacgggcgttgatgccaaaacagcaattggtcttggcctgccgtttagtttgttaatgcagtacgtcattctgttcttctattccgctttcagtttatttatgaccaaagccgataaatgcgcgaaagaggcggatacggcagcgttttcccggcttaactggacaacgatgctcatcgtcgctagtgcgtatgcggtgattgctttcctctgtacttacctggcacagggggcgatgcaggcgctggtgaaagcgatgcccgcctggctgacccacggctttgaagtggctggcggtattctgcctgccgttggttttggcttgctgctgcgcgtaatgttcaaagcgcaatatatcccttacctgatcgccggtttcctgtttgtttgctacatccaggtcagcaacctgttgccggttgccgtactgggcgcaggctttgcggtgtatgagtttttcaatgcgaaatcccggcagcaagcgcaaccgcagcccgttgccagtaaaaatgaagaagaggactacagcaatgggatctgaaatcagtaaaaaagatatcacccgtctgggctttcgtagcagcctgctgcaagcgagctttaactacgaaaggatgcaggcgggcggttttacctgggcgatgttgccgatcctgaaaaagatttataaggacgacaaaccgggcttaagcgcggcgatgaaagataacctcgaatttattaatacccacccgaatctggtcggattcctgatggggttattaattagcatggaagaaaaaggagaaaaccgcgacaccattaaaggcctcaaagtggcactgtttggcccaatcgccgggattggcgatgcgattttctggtttactttgttgccgattatggcgggaatttgcagtagttttgccagccagggaaacctgctggggccgattctatttttcgccgtttacctgcttatctttttcctgcgcgtcggctggacccacgtcggttatagtgtcggcgtgaaggcgatcgataaagtgcgagagaacagccagatgattgcccgtagcgcaaccatcctcgggatcacggtaatcggcgggctgatcgctagctatgtgcatattaacgtggtgacaagctttgccatcgacaatacccacagcgttgcgctgcagcaggatttcttcgataaagtcttcccgaacattttaccgatggcctacaccctgctgatgtattacttcctgcgggtgaaaaaagcgcatccggtgctgttaatcggcgtgacttttgtgctctctattgtttgttccgcattcggcattttgtaaatggaacgaggcactgcgtctggtggtgcctctttacttaaggaatttcatcctgtgcaaacccttcagcaagttgaaaactatacggcgttaagtgaacgtgccagcgaatatttattggccgtgatccgtagcaaaccgaatgccgtgatttgcctggcgaccggagccacgccattactgacgtatcattatctggtagaaaaaatccaccagcagcaggttgatgtcagccagctcaccttcgtgaagctcgacgaatgggtggatctgccattaacgatgccaggcacctgcgaaactttcctgcaacagcatatcgtgcagccgctggggctacgtgaagaccagctcatcagctttcgctccgaagagataaatgagacagagtgcgaacgggtaacgaacctgattgcgcgcaaaggcggtctggatttatgcgttctcggattggggaaaaacggtcatcttgggctgaacgaaccgggagaaagcctgcaaccggcctgccatatcagtcaacttgatgccagaacacagcaacatgagatgttaaaaaccgcgggtcgccccgtgactcgtgggatcaccttaggcctgaaggatattctcaatgcccgcgaagttttgttactggtgactggcgaaggaaagcaggatgcgacagatcgttttctcacggctaaagtctctaccgctatcccggctagttttttatggctgcacagtaactttatttgtttaattaacacctaaccagatgaaaaatttgctcaaaatgtttaaattaacttatgtaacagtcacgcattatattaaataacatttgactgggttgaacataacgccgatagcaaaaggagttatgttcaacaatttaattttagatatacatataacttgttctattaataaatcacctcgtattctgactcgccccctggcgcagcaaagtcaggcatttatactcttttgaatacatagaaaattgatatcaatataatgaaaatatcaaatatttgcatataaatataatcttaaagttcagtctatttaatgttcaatgaaatatttctgcctgtataatctttaaagatgttgaacatatattcacattaaatatgattatgtacttgttacaaggataaggttatatatgaataaagttacaaaaacagctattgcgggcttacttgcgcttttcgcaggtaatgccgctgcaaccgatggtgaaatagtttttgatggcgagattttaaaatccgcttgtgaaatcaatgactctgataagaaaattgaagttgctcttggtcactataatgccgaacagtttcgtaatattggcgagcgtagcccaaaaattccattcactattcctttagttaactgcccaatgactgggtgggagcacgataacggcaacgttgaagcgtctttccgtctatggctggaaacgcgagataatggcaccgtccctaacttccctaatctggcaaaagtaggctcttttgctggcatagcggcaacaggtgtgggtatccgtattgacgatgcggaaagcggaaacattatgccactgaatgctatgggcaatgataacacggtttatcagatcccggcggaatccaatggtattgtcaatgttgacctcatcgcttactacgtaagtaccgtagttccaagtgaaatcaccccaggggaagcagacgctatcgttaacgtaacgctggattaccgttaatacgttagggcgttatctgacctgtcagataacgcccttttccttcctctttctcgttgtatcaggttgaaaaataactatgagtaaacgaacattcgcggtgatattaaccttgttgtgtagcttctgtattggccaggcgcttgcaggaggaatcgttttacagcgaacgcgagtgatctatgatgccagccgcaaagaggctgcgttacctgtcgcaaacaaaggcgcagaaacgccttatttactgcaaagttgggtagataatatagatggtaaaagccgtgccccatttattataaccccaccgctatttcgtcttgaggctggcgatgacagtagtctgcgaattattaaaacagctgataacctgcctgaaaataaagagagcctgttctacattaatgttcgtgccattccagcaaagaaaaaaagtgatgatgttaatgctaacgagttgacgctggtatttaaaacacggatcaaaatgttttatcgccccgcacacctgaagggacgggtaaacgatgcgtggaaaagtctggaatttaaacgtagtgaccatagtctcaatatatataacccaactgaatattacgtcgtatttgccggactggcagtcgataaaaccgatctcacaagcaaaattgaatatatcgcgcccggagaacataaacagttaccacttcctgcatctggcggaaagaacgtgaaatgggctgcgatcaatgattatggcggcagttccgggacagaaactcgtccactgcaataaaaaatataaaaacacaggtcatcagggaatgccacaacgacaccaccagggacataaacgcacaccgaaacagttggcgctcatcatcaaacgttgtttgccgatggtgctcactggcagcggcatgctttgcactaccgctaacgccgaagagtattatttcgaccccattatgctggaaaccacaaaaagtggtatgcaaacaaccgatctgagccgttttagtaaaaaatatgcacaactaccaggaacttatcaggttgatatctggctgaataaaaagaaggttagtcagaaaaaaattacatttaccgccaatgcagagcaacttctgcagccacagtttacggtagaacaactacgtgagctgggtattaaggtggatgaaatcccggcgctggctgaaaaagatgacgatagcgtgatcaacagccttgaacaaatcattcccggtacagctgctgaatttgatttcaatcatcagcaacttaatttgagcattccccaaattgcactgtaccgtgatgcaagaggttacgtctccccttctcgttgggacgatggtataccaacgctgtttaccaactacagctttacaggttctgataaccgttaccgccagggcaatcgtagccaacgacagtacctgaatatgcaaaatggtgctaattttggcccctggcgattacgcaactattccacatggacacgcaacgatcagacaagtagctggaataccatcagtagttatttacaacgtgatatcaaggcgttgaagtctcagttgcttctgggagaaagcgccaccagcggcagtattttttccagctacacctttactggcgtgcaactcgcttccgacgataatatgttgccaaacagccagcgcggatttgccccaacggtacgcggtatcgcaaacagtagtgcaatcgtgactatcaggcaaaatggttatgtgatctatcaaagcaacgtgagtgcgggtgcctttgaaattaacgatctctacccctcttccaacagcggcgatttagaagtcacgattgaagaaagtgacggtacacaacgtcgctttatccagccttattctagtttacccatgatgcagcgacctgggcatctaaagtatagcgcgaccgctggacgctatcgcgctgatgcaaacagtgatagcaaggaacccgaatttgctgaagccacggcaatatatggtttgaataatacttttacgctgtatggcggcctgctcggttctgaagattattatgcgctggggatcggtatcggcggcacacttggcgcactgggcgcgttgagcatggatatcaacagagctgacacccaattcgataaccagcactcttttcatggctatcaatggcgtacgcagtacatcaaagatatcccggaaaccaacaccaatatcgctgtcagctactatcgctataccaacgatggctattttagttttaatgaagccaatacccgcaattgggactataacagtcgccaaaaaagtgaaattcaattcaacatcagccagacaatatttgatggggtaagtctgtatgcctccggtagccagcaagactattggggcaataacgataaaaacaggaatatctctgttggggtttccggccagcaatggggagttggttacagcctgaattatcaatacagccgctacactgatcaaaataatgaccgcgcactctctttgaatctcagtattccgttagaacgctggttaccgcgtagccgggtttcctatcagatgaccagccagaaagatcgcccaacccaacatgaaatgcgtcttgatggcagtctgctggatgatggtcgcctgagctatagcctggaacaaagtctggatgacgataacaaccataacagtagcctgaacgccagttaccgtagtccttatggcaccttcagtgccggatacagctacggtaatgacagcagccaatacaattacggcgttaccggcggcgtggttatccatcctcatggcgtgacgctcagccaatatctgggcaacgcttttgcgcttatcgatgctaacggagcatctggcgtgaggatacaaaactatccggggattgctaccgatccttttggctatgcagtggttccttatctcacaacttatcaggaaaaccgtctcagcgtagatactacgcagctgcccgataacgtcgatcttgaacaaacaacacagtttgtggtgcccaacagaggtgcaatggtagcggcgcgtttcaacgccaatatcggttatcgcgtacttgttacagtcagcgatcgcaacggtaaaccgttgccctttggcgctcttgccagcaacgatgatacggggcaacaaagtatcgtcgatgagggcggcatactatatctctctgggataagcagtaaaagtcaaagctggactgtacgctggggaaatcaggcagatcaacaatgtcagtttgctttcagtacaccggatagtgaacctacaacctctgtattacaaggcacagcgcagtgccattaaggataaaaaaatgaaaagagcgcctcttataacaggtcttttgttgatatccacatcctgcgcttatgcctccagtggagggtgtggagccgacagcactagcggtgcgacaaattacagcagtgtggttgatgatgttacggtgaaccagacagataacgtgacaggacgggagtttacctctgcaacgctaagtagcactaactggcaatacgcctgttcctgctctgcgggtaaggcagttaaacttgtctatatggtcagccccgtacttaccaccactggacatcagacaggatattacaaactcaatgacagcctggatattaaaaccacattacaggcaaacgacattccaggactcacaaccgaccaggttgtctctgttaacacccgattcacacagataaaaaacaacacggtatattctgctgcaacccaaacgggtgtttgccagggtgatacgtctcgttatggacccgttaatattggtgcgaacaccacctttaccctgtatgtcaccaagccatttctcggcagcatgaccattccgaaaacggatattgccgtcattaaaggcgcgtgggtcgatggaatgggaagcccgtctacaggtgacttccatgatttagtcaagttaagcattcagggaaatctcaccgccccacagagctgcaaaattaatcagggcgatgttattaaggttaattttggattcatcaatggtcagaagtttaccacccgcaatgccatgccagacggttttactccagtagactttgatatcacttatgactgtggtgatactagtaagattaaaaacagcttgcaaatgcgcatcgacggtacaactggggtagtagaccagtacaacctggtcgccaggcgaagaagtagtgacaatgtgcccgatgtcggtattcgtattgaaaatctcggcggcggagttgcaaatattccttttcagaacggtatccttcccgttgatccttccgggcatggcaccgtcaatatgcgcgcctggccagttaatctggtcggtggtgagctggaaacaggaaaatttcagggcacagccaccattaccgtcatcgtgcggtaaaagaagacgttgcgttttgattaacgcaacgcttcggcactgttacccctgctgctccagcgcatacttatacagcgcatttttcttcacgccgtgaatttctgcggccagcgccgccgcttttttcagcggcagttctgcctgtagcagcgccagcgtgcgcagggcatcggcgggtaagtcttcttcctgtgctttatgaccttcgacaatcagcaccatttcgcctttgcgacggttttcatcttcctttacccacgccagcagctcgccaacgggcgcgccgtgaatggtttcccaggttttggtcagctcacgcgccagaaccacgtagcgggattcgcctaataccgcaacgatatcttccaggctatctaacagacggtgggtagattcataaaaaatcagcgtgcgcggctccgcttcaatggcttttagcgcatcacggcggcctttacttttggcaggtaaaaagccttcgtaacagaaacggtcagagggtaaacccgctgcgcttaacgcagtgatagcagcacacggcccgggtagcggcaccacgcggatccccgcttcacggcaggtacgcaccagatggtagccaggatcgttaattagcggcgttccggcatcggaaaccagcgcaatgttttgcccctcttgcagcttcgccagcagcgtttcagctttttgttgttcgttatggtcgtgcagcgcaaacaaccgggcattaatcccaaaatgttgcagcaataaaccggtgtgacgagtatcctcggcggcaatcagatcaacggcctgtaatacctctaacgcacgctgggtgatatccgccagattgccgattggcgtcggtacaatgtaaagctggccctgagaattatccgcgctttggtgttgtttcattgtgtcgtccgtattgccgatttaatattgagcattgcgtaaaaaaaatatcactggatacattatggtacccagtacattttctcgtttgaaagccgcgcgttgtctgcctgttgttctggcagccctgattttcgccggttgtggcacccatactcccgatcagtccactgcttatatgcagggcacggcgcaggctgattctgccttttatcttcagcagatgcagcaaagctctgatgataccaggatcaactggcaattactcgccattcgtgcactggtgaaagaaggtaaaaccgggcaggcggttgagttgtttaaccaactaccgcaagaactgaacgatgctcagcgtcgcgagaaaacactgctggcggtagagattaaactggcgcagaaagattttgctggcgcgcaaaacttgctggcgaaaatcacacctgccgatttagaacaaaaccagcaagcgcgttactggcaggcaaaaatcgatgccagccaggggcgtccttccattgatttactgcgcgcgttaattgctcaggaaccgctgcttggcgcgaaagaaaaacagcagaatattgatgccacctggcaggcgctctcctccatgactcaggaacaggcgaatacgctggtgatcaacgccgacgaaaatattctgcaaggctggctggatctgcagcgcgtctggtttgataaccgtaacgatcccgacatgatgaaagccgggatcgccgactggcagaaacgttatccgaacaatccgggcgcgaaaatgctgccaacgcagttggttaacgtaaaagcgtttaaaccagccagcaccaacaaaatcgccctgctgttgccactgaatggccaggcagcggtatttggtcgcactattcagcaaggctttgaagcggcgaaaaatatcggcactcagccagtggcagctcaggtagctgccgcacctgccgcagacgtagctgaacaacctcagccgcaaaccgtggatggcgttgccagcccggcacaagccagcgttagcgatctgaccggtgaacagcctgcagcccagccggtgcctgtaagcgccccggcgacaagcaccgcagcggtaagcgcacccgcaaatccatccgcagagctgaaaatctacgataccagtagtcaaccacttagccagatcttaagccaggttcagcaggatggcgcgagtattgtggtcggtccgttgctgaaaaataacgttgaagagttgctgaagagcaacactccgctgaacgtactggcactgaaccagccggagaatatcgaaaatcgcgtcaatatttgttacttcgcgcttagtccggaagacgaagcgcgcgatgcagcgcgtcatattcgtgaccagggtaaacaagcgccgctggtgctgatcccacgcagtagtttgggcgatcgcgtagccaatgcgtttgcgcaagagtggcagaaactgggcggcggcaccgttctgcaacaaaaatttggttccaccagcgaattacgcgcgggtgttaacggcggttctggtattgctttaacgggtagcccgattactctcagagcgacaaccgactccggcatgacgaccaacaatccaacgctgcaaaccacgccaaccgatgaccagttcaccaataatggcggtcgtgtcgatgcggtgtacattgtggcaacgccgggtgaaatcgcttttatcaaaccgatgatcgccatgcgtaacggtagccagagcggtgcaacgctgtacgccagctcccgcagtgcgcaagggaccgctggcccggatttccgactggagatggaaggcttgcagtacagcgaaatcccgatgctggcaggcggtaatctaccgttaatgcagcaggcactcagcgcggtgaataacgattatagtctggctcgcatgtatgcgatgggcgtcgatgcctggagcctggcaaatcatttcagtcaaatgcgccaggttcagggttttgaaatcaacggtaataccggaagcctgacggctaacccggattgcgtgattaacaggaacttaagttggctacagtaccaacaaggtcaggtagtccccgtcagttaaattaagtgattaacaggaacttatcatggctacagtaccaacaaggagtggtagtccccgtcagttaaccaccaaacagaccggcgatgcgtgggaagcacaagcgcgtcgctggctggaaggcaaaggactgcggtttatcgccgctaacgtgaacgagcgtggcggcgagatcgatctgataatgcgtgaaggccggaccaccatttttgtcgaggtacgctatcgccgctctgcgctttatggcggcgcggcagccagtgtgacccgcagcaaacaacacaaattattacagactgcccgcttgtggctcgcgcgtcataatgggagttttgatactgtggattgccggttcgatgtggtagccttcaccgggaatgaggttgagtggattaaggatgcctttaatgaccacagttaattaaggtttaaggattagcgtgcaagaaagaattaaagcttgcttcactgaaagcattcaaactcaaattgcggcggcagaggcgcttccggatgccatctcccgtgcagccatgacgctggttcagtctctgctcaatggcaacaaaatcctctgttgtggtaatggaacttccgctgccaatgcacagcattttgctgccagcatgatcaaccgtttcgaaacggagcggcccagcttacctgccattgcactaaatactgataatgttgtcttaacggcgattgccaacgatcgcttacatgatgaagtgtatgcaaaacaggtgcgggcgctgggtcatgcgggagatgtattgttagccatttccacccgtggcaacagccgcgatattgttaaagcagttgaagccgccgttacgcgtgatatgaccattgtggcattgaccggctatgacggcggcgaacttgcaggtttgttagggccacaggatgtggagatccgcattcctagccatcgtagtgctcgcattcaggaaatgcatatgctgacggtaaattgcctgtgcgatctgatcgataacacgcttttccctcaccaggatgattaaggagaatacatgaaggcattaagcccaatcgcagtccttatttccgcgctgctgttgcaaggttgtgttgccgctgccgtagtgggtaccgctgctgtgggtaccaaagccgcaactgacccacgcagtgtcggcacccaggtggacgatggtaccctggaagtgcgcgtgaacagcgcattgagcaaagacgaacagattaagaaagaagcgcgcattaatgtaacggcctatcagggcaaagtgctgctggttgggcagagtccaaatgctgaacttagcgctcgcgccaaacagattgctatgggcgtagacggtgccaacgaagtgtataacgagattcgtcagggccagccgattggtctgggcgaagcatctaacgatacgtggatcaccaccaaagtgcgtagccagctcttaaccagcgacctggtgaaaagctccaacgtgaaagtgaccaccgaaaacggtgaagtgttcctgatggggctggtgactgaacgtgaagcgaaagcggcggcagatattgccagccgggtgagcggcgtgaagcgggtaactacggcgtttacgtttattaaataacagccccttgtaatgcctgatgcgacgcttgccgcgtcttatcaggcctacaacgatacaaaccgtaggtcagataaggcgtttacgccgcatccgacatgttttccctcaaatcagaacaacagcgccagcccgccgacaatcacaccagacactgccaccatcgcccctgtcagccataaggctttcgccgggaacgctttgcgcagcataatcagactcggcaaactcactgccgggagcgtcatcaacaatgccagcgccggagcggttcccatacctgccagcatcatcgtttgtacaatcggaatttctgctgccgtgggaatgacaaacaagcatcctgctaccgccatcgccaccacccacatcaggctgttatcgacagcaccatcggcatgggggaataaccagacgcgagcggcacccaacaccagtactgcaaggatgtaaaccgggatcgtactccagaaaagcgtccatagcgccctgccccagcggctaaaaaacccgccctgtgcttccggtatgtcaatttcgaccggtgcctgcgtttgcggtgtttcacgcacccatttttgcaccagcgtcgcaatcagcaacaccatcaccagcccggccaccagacgaatcgccgcaaaaccccagccgaggacaaagcccataaacaccagcgtcgccgggtttaacaccggattgcccatccagaatgccagcgcaccgcccatgctcacctgttggcgacgcattcccgccgcgaccggagccgcacagcaggtacacatcatgcccggcaagctaaacagcgttcccagcagcgtgccgcgaaagcggctttgcccaagcgtacgcaacaaccagtcacgcgggatcagcacctgaatcaagctaccgaggatcacccccagcaccgccgctttccataccgcgaggaaatagatcatcgcgtaatccaacgccgcctgccatgggttagcatccgcctgcgcaaggatagatttaccgatactgtgggtttcggcagcagtaaacgctttgccgtagtaaggttcccatttcacataccagagaccggcaatgacaacgagaaagaaaagcgcgggtttccaccactgaatgggcgttgccgcctgagaactagactgaccagtcatagcattccccaggaataagttatgataattgagcgcgtgaatattacgctcactatcaattcttgggaataattattcagctcttttgcgtaattcactagagcttaaaatcgtcacgccttcatgctcaggccgcatgctctctgccagcatgacccgcgccacgtctctcgcatcaatggatttccagttacctggtaacaaacggaacagcggcgcaaaaagcgtttcgttcatccgctgtttgctacgatcgcccagtaacatgctcgggcgagcaatggtcaatttcggccagttctgggcgattaatgcttcttccatctcccctttgacgcggttatagaaaaacgggctgtgggcattggcacccatcgcactgactaccaacatatgctgcgcgcccagtcgccgcccggttaatgcggtatccactaccagcgtgtaatcggcatgaataaacgcctctttgctccccgcttctcgccgcgtggtgccgagacaacaaaacacaatgtcgatgggatcggtgacctgcgccaacgcgtcactcagttgcggatcatggggattaaacaccccgggcatatcgcccaacggacgtcgcgtcggcgcagcaatggcgttaactttcggttcgttaatcaacatccgcagcaggtgaccgcccaccagccccgttgcgcctgtaatcagtacctgactcatcttcgctcctttacagaattgtctgccttgcgctccacggctcatgcaccaggcttaatagaccatgaggtaattatccccgattgtgggaaattcgcctcatccaatgcaacaacgcggaggaagcatgagtaagaaaattgccgttttaatcactgatgaatttgaggatagtgaatttactagtcccgcagacgagttccgtaaagccggacacgaagtgattaccattgaaaaacaagcgggtaaaacggtgaaaggcaaaaaaggagaagccagcgtgaccatcgataaatccatcgatgaagtgacgcctgcggagtttgatgccctgctgctaccgggcggccatagtccggattatctgcgtggggacaaccgttttgtcacctttacccgtgattttgtgaatagtggcaaaccggtgtttgccatctgtcacggcccgcagttgctgatcagcgccgatgtgattcgggggcgcaaactgaccgcagttaaaccgatcattattgatgttaaaaatgcgggcgcggaattttacgatcaggaagtcgtggttgataaagatcagctggttaccagccggacaccggacgatctgccagcgtttaaccgcgaggcgttacgcctgctcggtgcctgattacgcctgctcggtgccactgtcgcgtagccaaatcatttttttaccaaagcccagcgtgttgtcggtgaatttgatttcatcgagccggatttcccacaccggggcgctcagcattctggcaaccggaaagcgacgattgtacgccttgcgcgcgaggtcgctttcctcaccttccagcctgcggatctcacctttaaactgcacaccgcgaattaacgctaccgttttcggctgaccgtttaccgttccggcaaccgcagcctgcggcccactcatctgcgcgtggcgcgttttttcttccgtcaaaatgtagaaggcgactttctgcgcatcaaaaagataaaaggcattagcgcaccagagttccccttcctgctgcacacaccaagtgacaacatgttgttttgccagccaacggctgatggcgatgagtgtttccattgctgttctcttttatactgtgggcctgaccttaacatgcgacgcagacgatgacaccctggtttctttacttgatccgtaccgccgacaataagctttataccgggatcaccacggatgtcgaacgccgctatcagcagcaccaaagcggcaaaggggcgaaagcactgcgcgggaaaggagaactaacgctggtgttttccgcgccagtgggcgatcgtagcctggcgttacgggcggaatatcgcgttaagcaactgaccaaacggcaaaaagagcgtctggtagcggaaggcgcagggtttgcagagctgttaagcagtctgcaaaccccggagattaaaagcgattgaaatgctcgtgatactcaaccaggccggtaacgccattcagcgcgtcatccgctaaacgatgtacctggaaggcgctttcagtgcccggccagcggcaacgcagatcgtgatgcgccgccagttcaaagccgaaacgactgtacagcgccggatcgcccagcgtcaccactgcggcatagccgaactcattaaggctatcgagtccttcatagaccagttggcgtgccagcccctgtccacggtatttttcatcaaccgccaacggtgccatgccgacccattgcaggtcttcgccctgcacatcaaccggactaaatgccacatagccaatgacctgaccttcgtcatctgtcgccaccagccccagcgtcagaaagccatcttcacgcagatcgtgaaccagcttcgcttccgcatcactttcgaaactgcgacgcagcagggcatcaatacccggcgcatcaatgggaatttctactcgaattagcatggttcacctacgcttgtctgtttggtttcaggcgcggttttcattcccgcctcaacaaaatccgccagttgcagcagcatcatgcgtaaggctttcggcatttgctccagttcaatggcgtccatcaggtttttcacatacagccccagctccgtatcgccttcaatcaccagccgacgctggaagaagagcgtatccggatcttgtttacgcgccgcaatcatcagcagatcgctggcgtcggcactaaaactcacatcagcttgcgcgttctggctaacgaccagtttgccattcaccacgctggtaaaccattgcaggtcaatatcacgcacatgaatacttaaccagcggccttcaagaaactccagctcgccatcatccagcgcctggcggaattgccagcttaagacctgctcaagaacctggcgttttagcgcaaatggcgtcagttttaccggtacactcaacagagatggccccaaatgcacaatacgggaacgcagtttatccaacacgagttttactccctgtttcaacaatcatcctattttgccatatcagaaaaataacatagcggtataaatcaacaattccatatgaaattgctgctaccaccaatacaactttaactgccttaaatcaaaaattgtcgcagcaaggttaactaaaatcccagttcgttaacatttttgcgttttgatagcgcaaccttcaggaaaaattatggagctgctctgccctgccggaaatctcccggcgcttaaggcggccatcgaaaacggcgcagatgctgtttatatcgggctaaaagatgataccaatgcccgtcacttcgccggccttaactttaccgagaaaaaattgcaggaagcggtgagttttgtccatcaacatcgccgcaaacttcacatcgcgattaacacttttgcgcatccggacggttacgcccgttggcagcgcgccgtggatatggcggcgcagctgggtgccgacgcgctgatcctcgccgacctcgccatgctggagtacgccgccgagcgttatccgcatattgagcgccacgtaagcgtgcaggctagcgcgaccaatgaagaggcgattaacttttatcatcgccattttgacgttgctcgcgtggtgctgccgcgcgtgttgagcattcatcaggtgaaacaactggcacgggtcacacctgtaccactggaagtctttgctttcggcagcctgtgcattatgagcgaaggtcgttgctatctgagcagctatctgacgggtgagagccccaacaccataggcgcgtgttctccggcccgtttcgtgcgctggcaacaaacgccgcaggggctggaatcccgcctgaacgaagtgctgatcgaccgttatcaggacggcgaaaacgcaggttatccgacgctatgtaaagggcgttatctggtggacggcgagcgctatcacgcgctggaagaaccaaccagtctcaataccctggaactgctgccggagttaatggcggcgaatattgctagcgtgaaaattgaaggccgccagcgtagcccggcgtatgtcagccaggtggcgaaagtctggcgtcaggctatcgaccgttgtaaggccgatccgcaaaactttgtaccgcaaagcgcgtggatggagacgctcgggagcatgtccgaaggcacgcaaaccactcttggcgcatatcaccgtaaatggcagtgagaaaagcaatgaaatattccttagggccagtgctgtggtactggccaaaagagacgctggaagaattttatcagcaggccgccaccagcagcgccgacgtgatttatcttggtgaagcggtatgcagcaagcgtcgggcaaccaaagttggcgactggctggagatggcaaaaagcctcgccgggagtggtaagcagattgtgctctccacgctggcgctggtgcaggcaagttctgaactgggcgaactgaaacgctatgttgagaacggtgagtttctgattgaagccagcgatctcggcgtggtgaatatgtgcgctgaacgcaaactgccgttcgtcgccgggcacgcgctgaactgctacaacgcggtgacactgaaaatattgctcaaacagggcatgatgcgctggtgtatgccagtggagctttcccgcgactggctggtgaatctgcttaatcagtgcgatgagctgggcattcgtaaccagtttgaagtggaagtcctgagctacggtcatctgccgctggcctactccgcccgctgctttaccgcgcgtagcgaagaccgcccgaaagatgagtgtgaaacctgctgcattaagtatccgaacgggcgcaacgtgctgagccaggaaaaccaacaagtgtttgtactcaatggcattcagaccatgagcggctacgtttacaacctcggtaacgagctggcatccatgcagggcctggttgatgtggtccgcctgagtccgcagggtactgacactttcgcgatgctcgacgccttccgcgctaatgaaaatggcgctgcaccactgccgttgacggcgaacagcgactgtaacggctactggcggcggctggcaggactggagctgcaagcctaagtaaatagctcactttgttaacaactttaactactctttaatgcagtattaaagattaatcggtaacaaagtgagctgttatgactgataaaaccattgcgtttagcctactcgatctggcccccattcccgaaggttctagtgcgcgagaagcattctcccactctctcgatctcgcccgtctggctgaaaagcgcggctatcatcgctactggctggcagaacaccacaatatgactggcattgccagtgctgccacgagcgtattgatcggctatctggcggcgaataccaccacgctgcatctggggtctggcggcgtgatgttgcctaaccacagtccgttggtcattgcagaacagttcggcacgcttaatacactctatccggggcgaatcgatttggggctgggtcgtgctccgggtagtgaccaacggacaatgatggcgctacgtcgtcatatgagcggcgatattgataatttcccccgcgatgtggcggagctggtggactggtttgacgcccgcgatcccaatccgcatgtgcgcccggtaccaggctatggcgagaaaatccccgtgtggttgttaggctccagcctttacagcgcgcaactggcggcgcagcttggtctgccgtttgcgtttgccagtcacttcgcgccggatatgctgttccaggcgctgcatctttatcgcagcaacttcaaaccgagtgcacggctggaaaaaccatacgcgatggtgtgcatcaatattatcgccgccgacagcaaccgcgacgctgaatttctgtttaccagtatgcagcaagcctttgtgaagctgcgccgtggcgaaaccgggcaactgccgccgccgattcaaaatatggatcagttctggagtccgtctgagcagtatggcgtgcagcaggcgctgagtatgagcttggtaggtgataaagcgaaagtgcgtcatggcttgcagagcatcctgcgcgaaaccgacgccgatgagattatggtcaacgggcagattttcgaccaccaggcgcggctgcatagctttgagctggcgatggatgttaaggaagagttgttgggataatgtgtcttaacgcgggaagccttatccgagctggcaacgctgtcctacatagacctgataagcgaagcgcatcaggcattgtgtaggcagcagaaatgtcggataaggcaccgctgattactgatacaccggcagtaaattaaagctgcttaaaatatgcaccagtgcgttgccgacgccaaacaccagaatcagcgcaatcatcggcttgccaccccagacgcggaatttcgggctgccaaagcgtttacggcttgcacgggctaacagcgccggaacaattgccgcccagatggtagccgctaaaccagcataaccaatggcgtacaggaatccgttcgggaacaacagcccccccacaactggcggggcaaaggtcagcaatgccgttttcaagcggcccacagcgctgtcgtcgaaaccaaacagatctgccagatagtcaaacaaacccagcgttacgccgaggaagctactcgctaccgcaaagttactgaacacgaccagcagcagatccagactacggctgttcagtacgccgcttaacgcctgtaccagcacatcaatattaccgcccttctctgcaataccgataaactccggacgcgggatgttacccatcgtcgccagcaaccagatggtatacagcgccagcgccatcagcgtaccgtacaccagatatttcacgatggttttcggatctttgccgtaatacttcatcaggcttggcacgttaccgtgataaccaaagcttgccagacagaacggcagggtcatcaacagatacggtgcataagacgcattgctttcggcgacgttgaacaatgtcgcaggctgcacatgccccagcaggctaccaaaggtgaggaagaaggtaatgactttcgcccccagcacaatcgctgtcatgcgactgacggctttagtgctcaaccacaccacaaacgctaccagcaatgcaaaaccaaaacccgccgcccgtgccgggacgtttagactcatctctgcgaaggtgtgatgcagaatgctaccactggcagaaatataggcataggtcaggatatagagcacaaaggcaatggaaatgccgttgaccacgttccagcctttgcccagcaaatctttggtgatggtgtcaaaactgctaccgattctgtaattcaggttagcttccagaatcatcaagccggaatgcagcatacagaaccaggtaaagatcagcgccgccatactccagaaaaaccacgccccggacatgaccactggcagagaaaacatccctgcgccaataatggtgccgccgataatcaccacgccgccaagcaggctcggactcgtttgggtggtggttagtgttgccatgagggcttctctccagtgaaaaatagtgcgactgcgttgttatgcattgcactgtaccagtacacgagtacaaaagacagaaaaaaagccccgatggtaaaaatcggggctgtatatattattttacagattgtgttcgctgttcagcgatgattacgcatcaccaccgaaacgacgacgaccggtagaatcatcacgacgcggagcgcggccttcacgacgttcgccgctaaaacgacgaccatcaccacggccaccttcacggcgttcaccgctgaagttacgaccgccttcacgacgttcgccaccgaaaccacgaccaccgccacgacgctcaccgccagtatgcggctgtgcatcgcccagtaactgcatgttcatcggcttgttgagaatgcgagtgcgcgtaaagtgttgcagcacttcacccggcatacctttcggcagttcgatggtggagtgagaagcaaacagcttgatgttaccaatgtaacggctgctgatgtcgccttcgttagcaatcgcaccaacgatatgacgaacttcaacaccatcatcgcggcccacttcaatgcggtacagctgcatatcgccaacatcacgacgttcacgacgcggacgatcttcacggtcaccacgcgggccacggtcgttacgatcgcgcggaccacggtcatcacggtcacggaattcacgtttcggacgcatcggcgcatctggcggtacgatcagagtacgttcaccctgtgccattttcagcagtgccgcagccagagtttcgagatccagctcttcaccttcagcagtcggctgaattttgctcagcagtgcgcggtattgatccagatcgctgctttccagctgctgctgtactttagcggcgaatttttccagacggcgtttgcctagcagttctgcgttcggcagttctacttccggaatagtcagcttcatagtacgttcaatgttgcgcagcagacgacgctcgcggttctcaacgaacagcagcgcgcggccagcacgacccgcacgaccggtacgaccgatacggtgaacgtaagactcagaatccatcgggatatcgtagttaactaccaggctgatacgctcaacgtccaggccacgggctgcaacgtcggtcgcaatcaggatgtccagacgaccatctttcaggcgttccagtgtctgttcacgcagcgcctggttcatgtcaccgttcagcgcggcgctgttgtagccgttacgctcaagagcttcagccacttccagagtcgcgtttttggtacgaacgaagataatcgccgcatcaaaatcttccgcttccaggaaacgtaccagtgcttcgtttttgcgcataccccagacagtccagtagctctggctgatgtcaggacgggtagtcacgctggactgaatgcgcacttcctgcggctctttcataaagcggcgggtaatgcgacgaatcgcttccggcatggttgcagagaacagagcggtctgatgaccttccgggatctgcgccataatggtttcaacgtcttcgatgaagcccatgcgcagcatttcgtcagcttcatccagaaccagaccgctcagtttagagaggtccagagtgccacgtttcaggtggtccagcagacggcccggagtaccgacaacgatctgcggcccctgacgcagggcgcgtaattgcacgtcataacgctggccgccgtacagagcaaccacatttacgccgcgcatgtgtttagagaaatccgtcattgcttcagcaacctgtaccgccagttcgcgggtcggtgccagcaccagaatctgtggtgctttcagctcaggatcaagattctgcaacagaggtaaagagaatgctgcagtttttccgctccccgtctgggccatacccagaacgtcgcggccattcagcagatgtggaatacactctgcctgaattggagatggtttttcgtaacccagatcgttaagggcttcaaggataggagccttcaggcccagatctgcaaaagtggtttcgaattcagccatgtagtacgtgtgcctcaaaattaatggcggccagtctacataactcatcatgaaattgatcagcaattttcattgaaaagtgtgaaccggctcaaagtaggtgtattaacgaacaacaacgccctcacccgttaaggtgatggcaatcaaaaaagattacgggctgatgtgtacgtcagttattgctggtcgctttctgccaggtcatcttggtcctggcccaggaggcttaattccaacaatgcgtatcggtgctcaacaaagttatgaacgttgttggcaaccgccagtttgaacagtgccgtggcgctgtccaaatcccccagacttaggtagtacttacctaaatagaagttggtttcactgagatgctcagcgaggctggtgttatccgttgcgtccgccttgagcctttccattaacgtttgttcgctaatgttgcccaggtagaactcgacaatgttccatccccactgttccttatcgcttttttcgaagtgctgtttcaacacttctttagcctgcttctcatcgagcttctgctcggcgagataaagccacagactacggaaaggatcattgggatcgtcttgataaaacgccagcagatcatcttgcgctaacttgtcacgaccgccgtaatataatgcgatcccgcgattcaagtgcgcgtagttgtaagttggatcaagctcaagtacagaatcaaacgcttcataggcagcatcaaaattgcctgcctgcgttaaatatatgcctaagtaattgaatacttcaggcatatccggtcggattgccagcgcttggctaaaatcgttacgcgctaatgccctcagaccgagactatcatacaacactccgcgctcatataaaagctgtgcgcgttcgtcatcggttaaagcccgactggcaaggatttgttccatacgtgccagaatcacttcctgctgtaaagtcggttgcaatggtaccgcgaggacttcacttttacgccaggaagtattactgcatcctgcaagcgtaagtgctgtcgcaacgaaacaccagcgcaaaaaaggcttcatttcccactcccgaagaccacggttgaatgaacgtcctgttcccggttgctaacaaggcgtcctgcccggttaaaagccccccgccgcagcggagggcaaatggcaaccttactcgccctgttcagcagccggagcttccggtgctgcagcaggttgagactgctcagtcgcttctttaatgctcagacggatacggccctggcgatcaacttccagaactttcaccggtacttcctgacccatctgcaggtaatcggtcactttctcaacgcgtttgtcagcgatttgagagatgtggaccagaccttctttaccgccgccgatggcaacaaatgcgccaaagtcaacgatacgggtcactttaccagtgtagacgcggcccacttcgatttctgcagtgatctcttcgatacgacgaatagcatgtttcgctttctcgccgtcggtcgctgcaatcttcacagtaccgtcatcttcgatttcgatggtggtgccagtttcttcggtcagagcacggattacagaaccgcctttaccgataacatctttgatcttgtccgggttgatcttgatggtatggatacgcggtgcgaactcagagatatcgccacgcggcgcgttgatcgcctgttccattacgcccaggatatgcagacgcgcacctttagcctggttcagcgcaacctgcatgatctctttggtgataccttcaattttgatatccatctgcagtgcagagataccgtcgcgggaacctgcaactttgaagtccatatcgcccaggtgatcttcgtcgcccaaaatgtcagacagtacaacgtagttgtcgccttctttcaccagacccattgcgatacccgcaacggcagctttgatcggcacacctgcgtccatcagcgccagagacgcgccgcacacggaagccatagaagaggaaccgttggattcagtgatttcagacacaacacgtacggtgtacgggaatttgtccatatccggcatgactgccagcacgccgcgcttcgccagacgaccgtgaccaatttcacgacgcttcggagaaccgaccatgccggtttcgcctacggagtacggagggaagttgtagtggaacaggaaggtatcggtacgttcgcccatcagttcatcaagaacctgcgcgtcacgagcagtacccagcgttgcggtaaccagcgcctgcgtttcaccacgggtgaacagcgcagaaccgtgagtacgcggcagcacgccagtacgcacatccagaccacggatcatatctttttcacgaccgtcgatacgcggttcgcctgccagtacgcggctacgaacaacgtttttctcgatcgcgtgcagaatttcacccagttcgttttcgtccagggtttcgtcttcagcaagcagcgtcgcgatggtttcagatttgatgacatcaacctgcgcataacgctcttgtttgtcggtgatgcggtaagcatcgctcaggcgagcttcagccagtgcagcaacgcgcgcgtttagcgcttcgtttaccggctccggctgccagtcccaacgcggtttaccggcttctttcaccagttcattgatgttctgaataacaacctgctgttgttcatgaccgaacactactgcgcccagcatctggtcttcgctcagcagttgagcttcagattcaaccatcagtacagcggcttcagtaccggcaacaaccagatccagtttgctctctttcagctcgtcctgagtcgggttcagtacgtactggtcattgatgtaacctacgcgggcagcaccaatcgggccattgaacggaataccagacagagacagcgctgcggaagcaccaatcatcgcgacgatatccgggttaacttgcgggttaacagaaaccacggtggcgataacctgaacttcgttgacgaagccttccgggaacagcgggcgaatcgggcggtcaatcagacgcgcgatcagggtttcgccttcgcttgggcggccttcacgacggaagaagctacccgggatacgaccagcagcgtaggtacgctcctgatagttaacggtcagtgggaagaagtcctgacctggtttggcttttttctggccaacaacggtaacgaataccgcggtgtcatccatgctaaccataacagcggcagtagcctgacgagccatcatgccggtttccagagtcacggtgtgttggccgtactggaatttacgaacgatcggattaagcaatgtaatatcctttctctttcttagacagtaccttacggcactggtgttaataccgcttcttctgcgcatcctcgcgactaatgacaaccctaacccagctctatgtgggtaaagcctctcattagccgcgcgaacctctgcaacggaagatcattcatagcaacaatacattagtttccagtgaattgctgccgtcagcttgaaaaaaggggccactcaggcccccttttctgaaactcgcaagaattagcgacgcagacccaggcgctcgatgagctgggtgtaacgtgctacgtctttacgtttcaggtagtcgagcagtttacgacgctgagaaaccatgcgcagcagaccacgacggctgtggtgatcttttttgtgctctgcaaagtggccctgcaggtggttgatctgtgcagtcagcagtgctacctgaacttcggtagaaccggtgtcgtttgcgtcacgaccaaactcagaaacgattttagctgttgcttcagtacttagagacattttaaaactccaaagtatatagaatgaaaggacgccgatctctaattcagcgatcccagtgtacgttacgcaaagtgttaaacaatttacgcgacgttaagcggcagtattctactcgtagcgacctgttatcgcaagacggttaacattacgccgggtattcaaccaccaggcgacgaggcgcaacgcggccttcatcgtcaatttcgcccataccgataaatttgccgttctcaccttccgtgacgcgaaccagtccttccagtggcgcaccagatgtacgaaccgggttaccatttttgaagtaaacagaagacgttaacggaagattcaccaccggatagtcgctagctggactgtccattggcatcagtaatggatcaagtaactccgcggctggaatatcctgctgttcagcttgctcaacaagttcacgcaggtgctccagggtcaccatccgttcaaccggatatttacttaccgccagacggcgcaggtaaataacatgcgcgccacagccgagtttttcacccaggtcatcaatgatggtgcggatataagtgcctttactgcagtgaatttccagctccagctcattgccttcatggcgaataaacagcaattcataaacggtaatcggacgcgcttcacgcggaacttcaatgccctgacgcgcatattcgtacagttttttgccctgatatttcagtgcactatacatgctagggatctgttcgatatcgccacggaaagtatccagtgccgctgccagctgctctgcgctaaaggttaccggacgttcttcaacgatctgtccgtcggcatcagaagtatcggtacgctgtccaagacgcgcaatgacccgatagcgtttgtcggagtccagcagatactgggaaaacttcgtcgcttccccgaggcaaatcggcaacatgccggtcgccagcgggtccagcgcaccggtatgcccggcacggttggcgttatatatacgtttcactttttgcagcgcatcgttgctggacataccctgaggtttatccagcaacaaaacgccgttaatgtcgcgaccgcgacgacgaggacgactcattagtcctccttgctgtcgtccgggttaacacgacgttcttcgtcatgtttgaccacgctggtcaccaggttactcatgcgcatcccttcaaccagagagttgtcgtagaagaaggtcagttccggcacgatacgcaggcgcatcgctttccccagcaggctgcggatgaaaccagaagcttcttgcaacgctttgatgcccgctttaaccgcgtcttcatctttgtcgttgaggaacgtcacatatactttggcatacgccaggtcgcgagacatttcgacaccggaaacggtggtcatcatgcccaggcgaggatctttaatttcacgctgcaggatgagagcgatctctttttgcatttcctgcgctacgcgctgcgggcgaccaaattctttcgccataataaattctcctgacaaaaaaggggctgttagcccctttttaaaattaatttcaggtggaagggctgttcacgttgacctgataagacgcgccagcgtcacatcaggcaatccatgccggatgcagcgtaaacgccttatcccgcatggaaccctaaaaaccttaagcaatggtacgttggatctcgatgatttcgaatacttcgatcacatcgccagtgcggacgtcgttgtagttcttaacgccgataccacattccataccgttacggacttcgttaacgtcatctttgaagcggcgcagggactccagctcgccttcgtagataaccacgttgtcacgcagaacgcggatcgggttgtgacgtttaaccacaccttcggtaaccatacagcctgcgatggcaccaaatttcgggcttttgaacacgtcacgaacttccgccagaccgataatctgctgtttcagttccggagacagcataccgctcatcgccgctttcacttcgtcaatcaggttatagatgacggagtagtaacgcagatccaggctttccgcttcaatcactttacgtgcagaggcatcagcacgtacgttaaagccaaccaggatggcgttggacgccgcagccagggtggcgtcggtttcggtgataccacctacgccagaaccgatgatcttcactttaacttcgtcagtagacagtttcagcaaggagtcggagatcgcttcgacagaaccctgtacgtctgccttcaggacgatattcacttcgtgaacttcgccttcggtcatgttggcgaacatgttctcgagtttagatttctgctgacgcgccagtttaacttcgcggaatttaccctgacgatagagtgcaacttcacgcgctttcttctcgtcacgtacaacggtaacttcatcacccgcagccggtacgccggacaggccgaggatttccaccggaatggacggacccgcttccagcacttcctgacccagttcgttacgcatcgcacgaacacgaccgtattcgaagccacacagaacgatatcgcccttgtgcagagtaccttcacgtaccagaacggtagcaaccggaccacgacctttatcgaggaaggattcgataaccgcaccgctcgccatacctttacgtaccgctttcagctccagaacttccgcctgcagcaggatagcgtccagcagttcatcgataccggtacccgctttcgcagatacgtgtacgaactggctttcaccgccccactcttccggcaggatgccgtactgggagagttcgttcttaacgcgatccggatcagcttctggtttatcgatcttgttcactgcaaccaccaccggtacctgcgccgctttcgcgtgctggattgcttcgatggtctgcggcatcacaccgtcgtcggcagcaacaaccaggactacgatgtccgttgcctgcgcaccacgagcacgcatactagtaaacgcggcgtgccccggggtgtccaggaaggtgatcatgccgttttcagtttcaacgtggtatgcaccaatgtgctgggtaatgccgcccgcttcgccagaggccactttcgtactacgaatgtagtccagcagagaggttttaccgtggtcaacgtgacccatgatggtcacaaccggcgcgcgcggttcagccgcagcacccgtgtcacggtcgctcattaccgcctcttccagctcgttttcacgacgcaggataactttatggcccatctcttcagcaaccagctgtgcggtttcctgatcgataacctggttgatggttgccattgcgcccagtttcatcatcgctttgatgacctgagagcctttaaccgccatcttgttcgccagttcgccaacggtgatagtttcgccgatcacaacgtcacggttaacggcctgagcaggcttctggaagccttgctgcaggctagaacctttacgttttccgcctttaccgccacgtactgctgcgcgtgcttcttcacgatcagctttactttcagcgtgtttgttgcctttcttcggacgcgctgctttcgcgttacgaccacggccacggccgccttcgacttcacgatcgctttcgtcttctgcctggcgagcatgttgagaagtagtgacgtgataatcgctggaatcttcagtcggttccgcgttatcagtccatttgttttcttccgccatacgacgtgcttcttcagcaacgcgacgtgcttcttcttcgagtttacgacgcgcttcttcttcagctttacgcttgagctctgcagcttcctgctcacggcgggctttttcagcctgggcgtttttagtcatatcgtcttgttgattgctcactttgtctttttccgcagcttcacgtttcgcttgttcagcagcttcacgcttagcttgttctgcggcctcacgttcagctttttgttgcgcctcgcgtttagcgctttcttctgcctcacgacgggcttgctcttccgcttcacgctgcgcttgctcttccgctgcaaggcgttcagcctcttgcggatcgcgtttcacaaaggtgcgtttcttgcggacttcgatttgtacgcttttgctttttccaccggtaccaggaatgttaagggtgctgcgtgttttacgttgcagcgtcaatttgtccgggccactatttttctgattcaggtggtcaatcaaagtctgtttctcttgtgcagacacagagtcgtcagcagacttccggatacctgcatcagcaaattgctgtaccaggcgttccacggaggtctgtcgctctgcggccagcgttttaatcgttacatctgtcatgctgttccttcctgctacagtttattacgcttcgtcaccgaaccagcaaatattacgggcagccataatcagtgctccggctttttcgtcggtcaacccttcgatatcagccagatcatcaatgccctgttcggcgagatcttccagcgtacaaacgccacgggcggccagtttgaatgccaaatcacgatctaccccttcaaggttcagcagatcgtcagccggtttgttatcaccgaggctttcttcctgggcctgtgcaatggtggccagtgcatttttagcacgctcgcgcagtgcttcaacggtcggctcatcaaggccttcgatttccaacagctctttcatcggcacataggccaattcttccagcgtgctgaagccttcttctaccagaacagtcgcgaagtcttcgtcgatgtcgagatatttggtgaaggtgtcgatcgctgcgtgcgcttccgcctgatgcttagcctgcaggtcgtcaacggtcatcacgttgagttcccaaccgctcagctggctagccagacgcacgttctgaccgttacggccaatcgcctgcgccaggttaccggcttcaacggcgatatccatggtgtgtttatcttcatccaccacgatagaagcaacgtctgccggtgccattgcgttaatcacgaactgcgccgggttatcatcccacaggacgatatcgatacgctcgccacccagttcagtagacaccgcctgaacacgcgcgccacgcatacctacgcaagcacctaccggatcgatacgtttatcgttggttttcaccgcgattttcgcacgagaacccggatcgcgagccgctgctttaatttcaatcacttcttcgccgatttctggcacttcaatacggaacagttcgatcagcatttccggcttggaacgagtgacgaacagttgcgcgccacgcgcttccgggcgaacggaatagagcacgccacgaacgcggtcgccagggcggaagttttcacgcggcagcatatcttcgcgcaggatcacggcttcagcgttgttgcccagatccagagagatgttgtcgcggtttacttttttcaccacgccggtgatgatttcaccttcgtgttcacggaactgatcaaccaccatcgcacgttcggcttcacgcactttctgcacgataacctgttttgccgtctgggtagtgatacggtcaaaggtaacagactcaatctgatcttcaacgtaatcgcccaggttcaggctttcatcttcataacgtgcggcttcaagggtgatttccttggtcggctgggtgacttcatcaacaactaaccagcgacggaaagtgtcaaaatcaccgcttttgcgatcgatctgtacgcggacgtcgatctcttgttcatattttttctttgttgctgtcgccagcgcgctttccaatgcttcgaaaatcttctcgcgaggtagcgccttttcattggatacggcttcaactacagccaaaatttctttgttcatcgcgggcttttcacctcatccagactattaaaagtggggaaccaggttcgccttctggatattactcagcgcgaacacttcatctttaccttcgacggtaactgtgatcatttcaccgtctaccgctttgataacgccctgccatttacgacggttttgtaccgccatacggagaaccagagtcacctcttctccgacaaaacgggcgtagtgttcagccgtgaacagtgggcgatcgagacccggactggagacttccaggttataagcaacggtgatgggatcttcaacatccagcacagcacttacctggtggctcacatcagcacaatcatcaacattgatgccatcttcactatcaatatagatgcgcagtgtggatgtgcgaccgcgaataaattcgatgccaaccagttcaaaacccagggcctcaactggcgcagtaatcatctctgttaatttttgctctaatgtggacaagcccacccccaagacataaaaaaagggcctaaagcccagttattctgtagtcagataacaaaaaaccccgataaatcggggctttatataactgaaccctataaccgcaactgcggtctggagcactttccagaaggattttttcaaatcccactacgaaggccgaagtcttcacagtatatttgaaaaaggactctaagggaaagtggttgcgggggccggatttgaaccgacgatcttcgggttatgagcccgacgagctaccaggctgctccaccccgcgcctgaaacgtggcaaattctactcgttttgggtaaaaaatgcaaatactgctgggatttggtgtaccgagacgggacgtaaaatctgcaggcattatagtgatccacgccacattttgtcaacgtttattgctaatcatgtgaatgaatatccagttcactttcatttgttgaatacttttgccttctcctgctctcccttaagcgcattattttacaaaaaacacactaaactcttcctgtctccgataaaagatgattaaatgaaaactcatttattttgcataaaaattcagtgagagcggaaatccaggctcatcatcagttaattaagcagggtgttattttatgacgacgattctcaagcatctcccggtaggtcaacgtattggtatcgctttttctggcggtctggacaccagtgccgcactgctgtggatgcgacaaaagggagcggttccttatgcatatactgcaaacctgggccagccagacgaagaggattatgatgcgatccctcgtcgtgccatggaatacggcgcggagaacgcacgtctgatcgactgccgcaaacaactggtggccgaaggtattgccgctattcagtgtggcgcatttcataacaccaccggcggcctgacctatttcaacacgacgccgctgggccgcgccgtgactggtaccatgctggttgctgcgatgaaagaagatggcgtgaatatctggggtgacggtagcacctacaaaggaaacgatatcgaacgtttctatcgttatggtctgctgaccaatgctgaactgcagatttacaaaccgtggcttgatactgactttattgatgaactgggcggccgtcatgagatgtctgaatttatgattgcctgcggtttcgactacaaaatgtctgtcgaaaaagcctactccacagactccaacatgcttggtgcaacgcatgaagcgaaggatctggaatacctcaactccagcgtcaaaatcgtcaacccgattatgggcgtgaaattctgggatgagagcgtgaagatcccggcagaagaagtcacagtacgctttgaacaaggtcatccggtggcgctgaacggtaaaacctttagcgacgacgtagaaatgatgctggaagctaaccgcatcggcggtcgtcacggcctgggcatgagcgaccagattgaaaaccgtatcatcgaagcgaaaagccgtggtatttacgaagctccggggatggcactgctgcacattgcgtatgaacgcctgttgaccggtattcacaacgaagacaccattgagcagtatcacgcgcatggtcgtcagttgggccgtctgctgtaccaggggcgttggtttgactcccaggcgctgatgctgcgtgactctctgcaacgctgggttgccagccagatcactggtgaagttaccctggagctgcgccgtgggaacgattatagtatcctgaataccgtcagtgagaacctgacctacaagccagagcgtctgacgatggaaaaaggcgacagcgtgttcagcccagatgatcgtattggtcaattgaccatgcgtaacctggatatcactgatacccgcgagaaacttttcggttatgccaaaactggcctgctttcctcctctgccgctagtggcgtgccgcaggtggagaatctggaaaacaaaggccagtaattcgacatcaaccctgcccttcaggggtggggttaccttgcttatcctctgtaaactcctttctgagcatcacataatcgaaaacatcatggtttgcatccacaacccgactgtctcctttatagtgtgcaatcacttcctcaagcgtttgcggctgttccggctttgttacccccatccacgcattaataaggtaattattgtaagctgtgctaaagatgttgttttccgttgtgcgatccacgccatccccaagaacggggctataccagataaacatcgggacatgatatgcctgctggctagcctccctgcctccatgaaaatagacgttcttcttcgtagggtcacgttccaggccgtggtcggcaaaatacatgacgctggcgcggcgatcttttaataattcaaaaacctgacctagcaaactatctgtgtaatgaatggagttgtcatagcaggcatcctgatcgtcctgcggttgaaacacggcgctggattgcggataggcgctacaagccggttcatggcttccatttaaatgaagaacaatcagtttcttttgctgcgtattttgctgtaatgcttggcttaaatgcggcaacaacaattcatcaaatcctctgacataaactgtttccatggcgcgcatggcgatactggtaactgctgtaccattctgccgaaaagcggattggctgcttagccagaaagtctgaaatcctgcttgattagccatattaataatgttgtcggggtaattatgaatgtcatgactcaaaacagaatcagcagttaaagaaaggggaacgctcagcgcagtgtaaggtgcgccgcttattgcttgattaaacagtttgatctgttttctttgtgcttcaacttgcggtgtcgtagagcgtgtatatccatacaaagacatattgtcgacacgtacagactcccccacaatcaacacgtaggtatcaatacctgtatccctgacacttaattgaaaatacggcaccgtgtttgcaatactgagtaatctttgatgctctttcgctgctaaagcaaaatagttgagattgaaaaacggcgtataggtagcaaatcggctcgctagtatatatggactgaacgcttttttattttttgcatctttataagcaaattgacaagcggaaaataaactgccgctaatgacaatcagcaataatattcctgtcactttttttgtcggcaaggaaacatcatattttattattactgccaaaaaaagaagggataaaaaagcaaaggcacatagataagggatatacatccccagcattttgacaacttcatccggatcactctggagcacactaatcgcaaatccatcattgaaagttgtaccaaaggtacaccaactatagaggctaatactcatgtctgccgcagtcagtaacacaaatggtgcggcaacaagcaggcgaagcggaagggaacttatacgttttacaaccaggatggtcagaacgaagaacagcaagcgctgaaccatatgcgctccggaagaagcgactaagttcgtaataccaaaaacaataacacaaagatacaacaaccaatgagatttaaaagttctagcaaatttgttgaatactgtcatccagaaatccaagttcacaaccaatataaacaattatcaacaatgtttaattttatatcagacatgtttttcaactctgatccatatcagaacgaaacactgttagttttttctttttaaatgatgcggccattgcgttctcagtaattaaataacattatcaatgcgtctctaaacattacgcagaacgtagccatcagtcgttatactgacaggagcaggatggtttatcgagaagtaaacatatccgtattcgtaccggaactggagttgacacaataaagtgccaattatgtcagtagaagggaaaaatttataactaaggcgtaccggcaccatcgtttcaaggtaccagctacgagtaaagcaactggacgagatacagatacctgacaaccattcctcagaccaggaccaaaacgaaaaaagacgcttttcagcgtctcttttctggaatttggtaccgaggacgggacttgaacccgtaagccctattgggcactaccacctcaaggtagcgtgtctaccaattccaccacctcggcacggatactactttttagttcgggatatcgctggtcggcttagccggagcagctggctgagtttgttcggttttcgccggtgcactcagattttcccattcgctacctttattggttttgttgctattgatgttacccagcaccagactgatgatgaagaataacgttgccagcagcgccgtcatgcgggtcatgaagttaccagaaccactactaccaaacagcgtagcggaagcgcctgctccgaaggaggctcccatatcagcgcctttaccttgctgcagcatgatcagaccaacaaggccaattgccacaataaggaaaactactaaaagagcttcatacataatcaacctgttccttgcggagttgccgcgtaccaatgcttcaaccaataaagcgggagtttttaatctttcccactgaagcgggtgtgaatactaaccaaagcgaatgaccttcgcaagggcaattttatcgcattgtatcaactgcggaaaaaaacagcaaaaccgatgtgttcgctgagaaaaaaggcgacaatcgccgcctttttagccagttatctaacgctttaaacggcttttactgcatcggcgatgcggtgtgcaaattcagtcacctgcgcttcgtcttcgccttccaccatcacgcgaattaacggttcggtgccggatttacgcagcaacacgcgtccacggttgcccagcgcagcttcaacctctgcggtcacggctttaacactctcatgctcaagtggatcgccgctacctgcggtgtaacgtacgttaaccagaatctgcgggaacattttcatgccgctgcaaaggtcgtgcaggctcatatggttacgtgccatcgccgccagcacctgcaagccagcaacgatgccgtcaccggtagtagttttatccagcaggatcacatgaccggaattctctgcaccgatacgccagcctttctcctgcattttttccagtacgtagcggtcacccactttcgcgcgcgcaaatggaattcctaactgtttcagcgccagttcaagccccatgttgctcatcaatgtacccacagcgccaccacgcagctggccctgacgaagaccttcacgcgcgatgatatacatgatctgatcgccatcgactttattgccttcatggtcaaccataatcacgcgatcgccatcgccgtcgaaggcaataccgagatccgctttttcagccagcacacgagcctggagcgcgcgaacgtcggtagcccccacttcggcattgatgtttacaccgtttggctcacaaccgatagcgataacgttcgcccccagttcgcgcagcacgttcggcgcgatgtgataagtcgcaccgtttgcacaatccaccacaatcttcagttcactgaggctaagttcgttcgggaacgtggctttgcaaaactcgatatagcgacccgcggcatcaacgatacggctggctttacccagttctgcgctatcaacgcagctgatctccttttccatttccgcttcgatggcctcttctaccgcatccggcagtttggtgccgtcgatagagaagaatttaatgccattatcgtagaacgggttatggcttgcagatatcacaattccggcctctgcgcggaaggtacgcgtcagataagccacggccggtgttggcatcgggccagtgaagagtgcggaaaggcccgctgccgccagacccgcttccagtgcactctccagcatatagccagaaatacgcgtgtctttaccaataataatcttacgggagccgtggcgcgccagcactttacccgcggcccaacccagcttaagcacaaaatcaggtgtgatcggcgcatcccctacacgaccacgaatcccatcggtaccgaaatatttacgattactcatagcgtttgttttcctttgcagacagagtggcttccaccacccgcatcgcttctacggtttctttgacgtcatgaacacgaatgatgtgcgcgccttgcattgcggcaatgaccgcacaggccagactaccgctcaggcgctcggacggccccacgttcagcagctgcccaatcatgctttttcgactcatacccaccaacagcggcaggttgaaatggtgaaattcagccaggcgcgccagtaaactatagttatgggagagatttttaccgaaaccgaatccggggtcgagcaacaatttctcttttgcgatacccgcctgctcgcaacgtgctatttgctcaataaagtagcgattcacttctgcaaagacatcgtcatacttcggagcttcctgcatggtttttggatttccctgcatatgcatcagacaaaccggtaaaccggtttctgcagccgcctccagagcgccaggttcggaaagggagcggatatcattaataatgtgagcgccaactttcgcactctcacggatgacttctggtttggatgtatcgacactgatccagacttcgaagcgttgagcaattgcctcaaccacaggaataacacgttgcaactcttcttcaacgctaacttccgccgcccctgggcgcgtggactcgccaccaacgtcaatgatcgtcgcgccagcgttgatcatcagattcgcatgtttcaccgcatctatcaggctgttatgcgtgccaccatcgctaaaggaatcaggcgtgacgttgaggatccccattacgtgaggatggctaaggtccagactagtaccctgggcaaagagtttcatgatgttatccctggtatgaattgataagaaaaaaccccggagcacgccccggggttttcggtacaaatacagtcatctgatgcgggaacttacttgtcgcctaactgctcactcatggtgttacccgggttcggcgtacgcggttcatcaaccggacgaggagcctttggactaccattgtcgccagaattgttagaagcgcctggttcttcccagcccgctggcggacgtacatcgcgacgtgccatcaggtcatcaatctgcggtgcgtcgatagtctcatatttcatgagagcatctttcatcgcatgcagaatatccatattgtcggtcagaagctgacgcgcacgattatagttacgctcaatcagtgctttcacttcctggtcgatgatacgtgcagtttcatcggacatatgtttcgctttcgctacgctacggccgaggaacacttcaccttcttcttccgcgtacagcagtggacccaatttctcagagaagccccactgagtcaccatgttacgtgccaggttggtcgcaactttaatatcgttggacgcaccggtagatacatgttccggcccgtagatgatctcttctgccagacgaccaccgtacagcgtagaaatctggctttccagtttctgacggctggcgctgattgcgtcgccctcaggcaagaagaaagtcacacccagcgcacgaccgcgtgggataatcgtcactttgtgcaccggatcgtgttccggcaccaggcgaccgataatcgcatgacccgcttcgtggtaagccgtgctttctttctgcgcttccgtcatcaccatggagcgacgttccgcacccatcatgattttgtctttcgctttctcgaactcaaccatgctcacaacgcgtttgttgccacgagcagcgaacagtgccgcttcgttcaccaggttcgccaggtcagcaccggagaaaccaggagtaccacgggcaatgattgccgcgtcgatatcgggtgccaatggtacgcgacgcatgtgaactttcaggatctgctcacgaccgcgaacatctggcaagccgaccacaacctgacggtcgaaacggccaggacgcagcagggccgggtcgagaacgtccggacggttagtcgcggcgataacgatgataccttcgttaccttcgaagccatccatctcaaccagcatctggttcagagtctgttcacgttcatcgtgaccaccgcccagaccagcgccacgctggcggcctacggcgtcgatttcatcgataaagatgatgcacggtgccgctttcttcgcctgttcgaacatgtcacgaacacgggatgcacccacaccgacgaacatttctacgaagtcagaaccggagatagtaaagaacggaactttcgcttcgcctgcaatcgctttcgccagcagcgttttaccggtacccggaggaccgaccatcaagacgcctttcgggatcttaccgccgagtttctggaagcggctcggctcgcgcagatactcaaccagttcagcaacttcttcttttgcttcgtcgcagcccgcaacgtcagcaaaggtcgttttgatctgatcttccgtcagcatgcgcgctttgctcttaccaaagctcatggcacctttgccaccgccgccctgcatttgacgcatgaagaagatccagacaccaatcagcaacagcatcgggaaccaggagatgaagatagaagccagcaggcttggttcttcaggcggttcaccgacaaccttgacgttcttggtcaacaggttatccagtaatttcggatcctgaaccggaatgtaagtggtataacggttactatctttcttggtaacgttgatttcacgtccgttgatacgcgcttcacgaacctggtcgttattgacctcttgtaggaaggtagagtaatccaccttacggccattagactcgctgggcccaaagctctggaatacactcatcagcacaacggcaatgaccagccagagtattaggtttttcgccatgtcactcaagggattaacctcttattacaactgtgttaaaaacagcgtcaggatactctatatccagcatctttcaaactttcgtctgaaatctcccggttagggtttacgcccggtcgctacaatatacacttcccggctacgtgcacgagaagagtccagcttacgaactttgaccttcgtaaacagggagcgaatttcccttagatactcatcgaaaccttcgccctggaacaccttcactacaaaactgccacctggcgctaatacatcacgacacatttctagcgccagttccaccagatacatggcacgggggatatccaccgccggtgttccgctcatgtttggtgccatatcggacatgacaacctggactttgctgtcgccaacgcgctccagcagtgctttcatcaccagttcatcacgaaaatcgccctgaagaaagtccacaccaacgataggatccataggtaaaagatcgcaagcgatgatgcggcctttgccgccaatttgggtgaccacatattgactccaaccacccggagcagcaccaaggtcgacaaccgtcattcccggtttaaagagtttgtcactttgctgtatttcatcaagtttaaaccaggcacgggaacgtaacccctttttctgtgcctgttgaacatatttatcgctaaagtgttcctgaagccagcggctggagctggcagaacgcttcttacctgtcatttaactttcccatggggataactcatcgtaaccaattgcgtaaatttttacgcgcctatttggtgatatatgggagatggcggtagaatgacccgttttcaatcccaacgtaagcaaaaaatacgatgaatctgagtactaaacaaaaacagcacctgaaaggtctggcacatccgctcaagccagttgttctgcttggcagtaatggtttgaccgaaggggtgctggccgagattgaacaagcgttagagcaccatgaactcatcaaggtgaaaatcgccaccgaagatcgcgaaactaaaaccttgatcgtggaagctatcgtgcgcgaaaccggcgcctgtaatgtacaggtcatcggtaaaacgctggtgctttatcgcccaactaaagaacgtaaaatcagcctgccacgctaagattatcctaaagttacacacatttgctgtgtaaaacgaggggttttccgcaggcaggagagcaaaatgccacgctctgttcgttgataaaaggccgcatagcggcctttttcctttctttacaatacatcaacatcttgagtattgggtaattcttacaggtattccaccttaattacttcaaattctacttcgccgcccggcgttttgatgaccacaacatcatcttcttctttgccgatcaggccacgagcaatagggctgtttacagaaatcaggttttgtttaaagtcagcttcgtcatcgccaacgatgcgataagtctgttcttcgtcagaatccagattcagcaccgttacggtagcaccaaaaataacgcgcccattgttgggcattttggtgacatcaatcacctgcgcgttgctcagcttggcttcgatgtctttaatacggccttcgcagaaaccctgctgttcacgagctgcgtggtattcggcgttttctttcaggtcgccatgctcacgcgcttccgcgatagcagcaatgatttcaggacggcgcacagatttcagaaaatccagctcttcgcgtaatttttcagcgccgcgtaaggtcatcggaatagcttgcatttgttatacctcttgaatattcctgatagggcaagtcttcacccaccccggctgttcggcctgcccggcataactccttaccgggaccagaagcaaaaaaataccgacccgggtacaagtcccaggtcagctacaattcacattttgatagtcattttaccctgaagttcccgaagggtcatcgtttactttatagggcgttgcgccgtagtatgacggctcgattccaggttgttagcgcgagattatgcgattttccagatttatcatcggattgaccagctgtatagcgttcagtgttcaggccgcaaatgttgatgagtacattactcaactccccgctggtgccaaccttgccctgatggtgcaaaaagtcggcgcgagcgcccccgctattgattaccacagtcagcagatggcgctgcctgccagtacccagaaagtgattactgcgctggcggcgttgattcaactcggccccgattttcgttttaccacgacgcttgaaaccaaaggcaatgtggaaaacggcgtacttaagggtgacttagtggcgcgatttggtgccgatccgacgttaaaacgtcaggatattcgcaatatggtcgcgactttgaaaaaatctggcgtcaaccaaatcgatggcaatgtgttgatagatacctccattttcgccagccacgataaagcccccggctggccatggaatgacatgacacaatgctttagcgctccgcctgccgccgccatagttgaccgcaactgtttctccgtcagcctctacagtgccccaaagcctggtgatatggcttttatacgcgtggcatcttattaccccgttacgatgttcagccaggtacgcaccctcccccgtggttctgccgaagcgcaatactgcgaactggatgtggtgccaggcgacctgaaccgctttacgctgacgggatgcctgccacaacgttctgagccgctcccgttggcttttgccgtgcaggatggagccagctatgccggtgcaattctgaaagatgagttaaaacaggcgggtatcacctggagcggaacactgctgcgccagactcaggttaacgaacctggaacggtagttgccagtaaacagagcgccccgctgcacgatctgcttaagattatgctgaaaaagagcgacaacatgatcgccgatacggttttccgcatgataggccatgcgcgcttcaatgtgcctggaacatggcgggccgggagcgacgccgtgcgtcagatcctgcgccagcaagccggtgtcgatattggaaacaccattattgccgatggtagtgggcttagccggcataacctgattgcccccgccaccatgatgcaggtgctgcaatacattgcccaacacgacaatgaacttaactttatctccatgctgccgctggcgggctatgacggctctttgcagtaccgtgcaggtctgcatcaggcgggcgtggatggaaaagtcagtgcgaaaaccggtagcttgcagggggtatataacctggcgggattcattaccacagcgagcgggcaacgaatggcgtttgtgcaatatctttctggctatgcagtagaacctgcggatcagcgtaatcgccgtattccgttagtgcgttttgaaagccgtttgtataaagatatttatcagaacaattaatcaaaaagaaaccccggcacatggccggggcttcagattattgacaaagtgcgctttgtttatgccggatgcggcgtaaacgccttatccggcctacaaaatcgtgcaaattcaacatattgcaattctcttgtaggcctgataagcgtagcgcatcaggctgatttggcgtttatcatcagtgattaacgcttgtaaatgaactcaacgccttcttcgtcgtcttcgtcccagtcgtcatcccagtcttcatcatcctcttcagcaatctcttcaagctgctggcgatgataatcatcccacatgaattcgactttctctggctgtttcgcttcttcagcctgcacgaccgggttttcaatgataaaggtcatcacatcccagcagagatctttcacgcccagtccactcgccgcagagatcagataatatttatcttcccagcccagcgcctcagcgatcgctttcgctttctcttcggcttctaccttatccagcagatcgatcttgttgaacactaaccaacgcggtttcgtcgccagatcctggctgtatttttccagctcgctgataataatacgcgcgttttcaaccggatcggtgccgtcaatcggatcgatatcgatgaggtgcaacaggacgcggcaacgttccaggtgcttcaggaagcgaatgcccagacctgcgccttccgcagcgccttcaatcagtcctggaatatcggcaacaacgaagctcttttcgttgtccattcgtaccacacccagacttggcaccagagtggtaaacggataatccgccactttcggtttagccgcgcttaccgcacgaataaaggtgcttttacccgcgtttggcatccccaacataccgacgtcagccagcagcatcagctccagcagcagctcgcgcttatcgcccggcgtgccgttggttttctgccgcggtgtacggttaacggagcttttgaaacgggtattgcccagaccgtgccagccgcccttagcaaccagcagacgctgaccgtgtttggtcatatcgcccatggtttcaccagtaccctggtcgattacacgcgtacctaccggcactttaatcgtcacgtctttaccgcgcttaccggtacagtcgcggcttgcgccattctgaccgcgctctgcacggaaagatttttcaaaacgataatcgataagcgtgttcaggttctcgtcggcttccatccatacgtcaccaccatcaccgccgtcgccgccatccgggccgcctttcggaatatacttttcgcggcggaagctcacgcaaccattaccgccatcacctgcaacgaccagaatgcttgcttcatcaacaaacttcattttattctccgtaaatcattcgcctgcgcggggttggcttaccaccgttgtatgcttacgtaatccgccccaaatacgatgaccaatggcggaatacatcgcgcccgcaaccacgacaaacgcaccgagataacctaaaaggtttaacatcggtctggcgaagaaatcgggccaggccagacttaaaagatcactaaaaaacagcgtaaacagtggggtgagcgtgatgatcgcgctcacctgcgctgcctgccagcgagccatcgcttccgccagggcgccatatcctaccaaggtattcagtccgcaaaaaattaaacatgcgagctgccagtggctaagctgcgctatcactccaggctttgccagagggaagagcgcaattgtacataaagtgtacagtaaaaacaggatctgcggactggccagccgacgcaataaaaccttttgcgccacgccataactcacccaaaccgtcgccgcaccgaccccaaagataactccccaggtgtaatcggtgagctttgtaaatatctcgaccagactggtgttaaaaaacatcaccaggccgctcaggagcatcaatgcccctacaacctgagtgctgcgcattttctctttgaggataaatacgctggcaaccatcatgccaactgggctgagttgcccaatcacctggctagcggtcggactcaggtattgcaaggaactgctgaacaggatgaagttcccaaacagcccggcggtcgccactgccaacaaaatcaaccagcgtggcttacgaaacacgcgtaatggcggcaacctcttcttcaccgcaagaatggcacccaggccaatactcgccatcaagaaacggtaaaacacgattgtcggaggttccatcacctccagcacctgcttcattgcgattggcaacgccccccagcaaattgctgtggtgagcgccaaaagaatgccaatgcctgcctgctgcttcataccgtattccctgcaaagcgcatttgcggattaacgtcgcaccatgcgcatttttaccggttatcgaatgtaaaaagccccgcaacgtgttgcggggctttcatccgttaccgggacgcgaaaaacttattcagcttcgatgctgataaatttacggtttttcgggcctttaacttcgaatttcactttaccgtctgctttagcaaacagagtgtggtcacgaccgcaacctacgttagcgccagcgtggaatttggtaccacgttgacgaacgatgatgctacccgccagaacggattcgccaccgaaacgcttaacgcccaggcgtttagcttcactatcgcgaccgttacgtgtggagccgccagcctttttatgtgccatttgaaatctctcctcaggtcttaggcgctgatgccagtaattttcacatcagtgaaccactgacgatggccctgctgcttacgatagtgtttacgacgacgaaacttaacgattttaactttctcgccacgaccgtgagcaacaacttcagctttgattacgccgccatcaacgaaaggaacgccgattttgacttcttcaccgtttgcgatcatcagcacttcagcgaactcaacagtttcgccagttgcgatgtccagcttttccaggcgaacggtctgaccttcgcttactcggtgttgtttaccaccactttggaaaaccgcgtacatataaaactccgcttccgcgcacaccttttcaatgattcagagtgcgctataaatattcacaatagggcgcgaatattacgcaaaacgcacgcctttgacaagtgctacagtcaatacacgaagaaaaaaaacacaacttgtacggtaacgtttatctgtgccattttttcagtacaatcaccctatattcctaaccataaaccctaagttgcctttgttcacagtaaggtaatcggggcgaaaagcccggcttttgcgatgaatttagaaaaaatcaatgagttaaccgcgcaagatatggcgggtgttaatgcggcaatccttgagcagcttaattccgacgtccaactgatcaatcagttaggctattacatcgtcagcggcggcggtaaacgtattcgtccgatgattgctgtactggctgcacgagctgttggctatgagggaaatgcgcatgtcaccattgctgccctgatcgagtttatccacacggcgactctgctacacgacgacgttgtggatgaaagtgatatgcgcaggggtaaagctaccgccaacgccgcatttggcaatgccgccagcgtgctggtaggcgattttatttatacccgcgctttccagatgatgaccagcctcggtagcctcaaagtgctggaagtcatgagtgaagccgtaaacgtcatcgcagaaggtgaagttctgcaactgatgaacgttaacgatccggacatcactgaagaaaactacatgcgcgttatctatagcaaaaccgcgcgtctgtttgaggctgccgcgcagtgttccgggattctggctggctgtacgccggaggaggagaaaggcctgcaggattatgggcgctatctcggcactgctttccagttgatcgacgatttactcgattacaatgccgatggcgaacagttaggtaaaaatgtcggcgacgatctgaacgaaggtaaaccgacgctgccgctgctgcatgcgatgcatcatggcacaccagaacaggcacagatgatccgtaccgccatcgaacagggtaacggtcgccatcttctggaaccggttctggaagcaatgaacgcttgtggatctcttgaatggacgcgtcagcgtgccgaggaagaagcagacaaagccatcgcagcgttacaggtgctcccggacaccccttggcgagaagcactcatcggcctcgcgcacatcgctgttcaacgcgatcgttaatcccctcccctcatcccgcgcagcgcgcgggatggttccagtaagttccataaaaacacttattcagctctataacacctgaaaaatagggatgtgcatctttatatattctgaatattcacactctttacaggaactttttagagcaataggccatcaggagtatagtgatgctcgacagaagaagtgttctgaatgaaagcgactaacttaaggagtgaggaaaaatggaaagtaatttcattgactggcatcccgctgacatcattgcgggtttgcgcaagaagggaacgagtatggcggcggaatctcgcagaaatggtttgagttccagtacgctggcgaatgcattaagccgcccatggccgaaaggagagatgattattgcgaaagccctgggaactgacccctgggttatctggccaagtcgctaccatgatccgcagacccatgagtttatcgacagaacgcagttgatgcgtagctacactaaaccgaaaaaatgagtggtctggcggtagccccgcgaacggggctgccagctctcagacgattattcgcctttcacacgctcaatatttgcacctaaagcgcgcagtttgtcttcaatgcgttcgtagccacgatcgatgtgataaatacgatcaaccaccgtcgtcccttccgcaatacagccagccagcaccaggcttgcacttgcacgcagatcggttgccataacctgtgcgccagaaagtttttcaacaccgtgacaaataacggtattgctttcgatttcggcgtgcgcgcccatacggctcagctctggcacatgcataaagcggttttcaaagaccgtttcggtgataaacccggtcccttctgccaccaggttcaacagcgtgaactgggcctgcatatcggtcgggaatgccggatgcggcgcggtacgtacgttaacagccttcggacgtttgccatgcatatccaggctaatccagtcttcgccgacttcgatgtccgctccagcgtcacgcagtttcgccagcacggcgtcgagagtatctggctgcgcgttacggcagataattttgccgcgagaaatcgccgccgccaccaggaaagtaccggtttcgatacgatccggcagaacgcgatagacaccgccgcctaaacgttccacaccttcgatgacgatacgatcggtgccctgaccgctaattttcgcacccagcgtaatcaggaagttcgcggtatcgacgatttccggttcacgcgctgcgttttcaataatcgtggtgccttccgccagggttgcagcacacatgatggtcaccgttgcgccaacgctgactttatccatcacgatatgtgcacctttcaaacgaccatcgacggaagctttaacgtaaccttcttccagtttgatggtcgcgcctaattgttcgaggccagaaatgtgtagatcaaccggacgcgcaccgatcgtacaaccgccaggtagactaacttgcccctgaccaaagcgcgctaccagcggccccagcgcccagatagaagcacgcatggttttaaccagatcgtaaggtgcgcagaatacattaacgtcgcgggcatcaatatgcacagaaccattacgttctactttcgcacccagctggcttagcagcttcatacttgtatcgacgtctttcagtttcgggacgttctggatctctaccggttcttccgccagtagtgcggcaaaaaggataggcagagcagcatttttagcgccggaaattgtgacttcgccctggagcttcgttggcccctgaacacgaaatttatccatttagtttgttctcagttaacaattcatatccgctaccggcgaatcgcccatagctcaaaagccgttcagtttgcgatcgcgcgcccactccgcaggggtatacgctttgatgctcacagcatgaatgcggttatccgcaatatattccatcagcggaccatagaccgtctgctgttttttaacccgactcatgccgtcaaacaactcacccacggcaataacctgaaagtggctgccatcgccggaaacgtggacttcctggagggagagagcgttcatcaacacgctctgaatttcattattttccatgggatcttcaatcatcagttaataaaccagcgaaacatcttagagcaaagttgcgctggcataaataagcaaaaagcctcgctgataaatcagacaaggctcgacttgcaggcaggtttgccggacaggcggttaacgccatatccggcctgaaaaaatttaacgaggcagaacatcagcaggcaaattatacaatttcgccagggtatacactttgtcgtttaccccctgaagcgtcacattgttgccctgctttttcgccagatcgataagatggagcagcagtgccagtccccccgtatccacgcgggagacacggctaagatcgatgcaggtaatccccttcaccgcttcctcacgcatttcccaaagcggtagcaaaacgtcctgatccagctctccggataacgccagcgtgtcacccgtctgcatccagctcagactctcgctcattattttttctcttccagagtgattttctgttgagaaatgcttttcagttgcgcagtcaggccgtcgatacctttggtacgcagcagcgttccccactcgttttgtttggtggtgatcatactgacgccttcagcaatcatgtcgtaagcctgccaattgcccgtctgggagtttttacgccactggaagtccagacgcaccggcggacggccattcgggtcaataatggtaacgcgaataggcacaatggttttatcgcccagcggctgttctggcgcaatctgataggtttgaccgtgatacatcgccagcgcctgaccgtaagcctgcttcaggtactcacggaaagcggcaaagtaggcttcacgttgagcaggggtcgcactcttgtaatactggcccagcaccagcgcaccggcgtatttcacctgtacgtatggcagcagttcctgatcaacaatggtacgcagataatccgggttggcccgaatttgcggttgctcattcttcaggcgatcgaacgttttctgcgccgcctcgtccatcagcttatacggattggtctggtctgccgcggttgccgcactcagaggtgcaatcaccagcaaagcgaccatcattaaacgtttaaacatgcgtcggttctcctgaaattatttcgttgtacccacaggttcagtggtttcattattacctggcgcagcagctggcgcatcgccactattcttattgtcatcgcctttactaccgtaaaggaactgaccaatgagatcttccagcaccatcgcagacttagtgtcctgaattgtatcgccatccttcaggatagcagtccccagttccgggtcttcaaaaccgacgtttaatgccagatattgttcccccagcaggccggaagtacgaatgctcaggctactggtatctggaatgtggttataacgttgttcaatttccagcgttacgcgcggcagataggttttcgggtccagcgtaatatccgccacccgacccacaacaacgccaccaatactgaccggagagcgcgctttcaggccgccaatgttatcgaacgtcgcataaagcgtgtaggtcggttcagtacgtatggacgtcacgttcgccgccttcaggcaaacaaacagcgccgccagcagtgctgctaataaaaagatacccacccaaatttcattttttttcgtttgcatgaactcaattcccaaacatcaatgcggtcagcacaaaatccagccccagaacagccagagagctgtggacaacggtgcgagtggttgcccggctaatcccggcagacgtcgggatggcgtcgtagccgttaaacaagctaatccacgtcaccgtgatggcgaacaccacgctcttaatcagacagttgaccagatccatacgccagtcgacggcattttgcattgcgctccagaagaacccgctatcaatgcctttccaactgacgccgaccagagatccgccccagatccccacggcgacgaaaataaccgtcaacagtggtaaactaataaccccagcccagaaacggggagaaataacccgacgcagcggatccaccgccatcatctccatactggagagttgctctgtagcgcgcatcaggccgatttctgcggttagcgcgctaccagcacgcccggcaaacaacaacgcggcaaccaccggccccagttcacgcagtaggcttaacgccaccagcatacccagactggtttccgcactataagtggtcagaaccagataaccttgcagccccaacaccattccgatgaacacgccagaaaccacaataatcagcatgctcaggacgccgacattatagagctggcgcaccagcagcggcgcatgtttgcgaaattccggtttgccgaccagcgcattgaataacattaacccggcccgcccgaacgttctcagggttttaatccctttatgtccgaggctcgccagcgcatttaacagcatgagtggcttaactccctggtaaaagatcagcgtgataatcgccggcaggatagcggaacggaacaggcccgtcagctatcccgtccagaaactgacgtacgcgcggatcaggattcgcctgcaacgcctgggcactgccatgagcgacaatttttttgtccgccaggatccaggcgtgatccgcaatacttaacacttccggcacatcgtgagaaaccaccacacaagtcacgcccagcgcgctgttcagctcagaaatcagcttcaccagtacgcccatggtgatgggatcttgcccaacaaaaggttcatcaaacatgatgagatccggctccagcgcaatcgcacgcgccagcgctgcacgccgcgccatcccaccggaaagttcagaaggcattagtttagccgctccacgcagccccacggcctccagcttcatcatcaccgtactatgcaacaatggcgcgggaagttgggtatgttcgcgcagtggataggcgacgttgtcaaatacgttcatatcagtgaacaacgccccggactgaaataacatgctcatccgtttgcgcactgtatacaggcggctacgagacatcgccggaatattctcaccatcgaaaaggatctcaccatgatctggtgcgatttgcccgccaatcagacggagtagcgtcgttttaccgatgccgcttggccccatgatcgccgtgatcttccctcgcggcacggtcagggaaatattatcgaagatgcagcgattgccacgcgtaaaactgacatcgcgcatatcgactaaattcgccacagactgctccataattcacccttcgtcttgcgttgattttctaagcatggcgctcaatttaaccttgaacccaacatatttacagaatattacccgccgtggttagcgaaagctggcatttgttttactttttagccgcataaagtcaaaattaagcatccgttacggctttctgaaaatcttcagcggaccggcgagtatacctgaagaaaggacgttagatgcttttagctacggcactgttaattgttggtttacttttggtcgtttacagtgccgaccgcctggtttttgccgcgtctattctttgccgaacctttggcatcccgccgctgatcatcggcatgacggtggtcagtattggtacaagcttaccagaagtcatcgtcagccttgccgcgtctctgcacgaacaacgcgatttagccgttggtacagccctcggcagtaacattatcaatatattgctgatcctcggtctggctgcgctggttcgtccttttaccgtccattctgatgttctacgccgtgaattacccttaatgttgttggtcagcgtggtggccggttccgtactctatgacggacaacttagtcgcagcgatggtatctttctcctctttctggctgtgctatggctgctgttcattgttaaacttgcacgtcaggctgaacgtcaggggactgacagcctgaccagagagcagcttgcagagctgccgcgtgacggcggattgcccgtcgcgtttttatggctcggcattgcgcttatcatcatgccagtggccacgcggatggtggttgataacgccacggtgctggcgaattactttgccatcagcgagttgacgatgggtctgacggcaattgctatcggaaccagcctgccggaactggcaaccgcaatagcgggggttcgcaaaggtgaaaacgacattgctgtcggaaatatcattggcgcaaacatttttaatattgtcatcgtgttgggtttacccgcgctgataacgccaggagagattgatccactggcgtacagtcgtgactacagcgtgatgttgctggtgagcattatttttgcgttgctgtgctggcggcgctccccgcaaccgggccgtggtgtaggggtattattaactggcggatttatcgtatggctggcgatgttgtactggttaagcccaatactcgttgaataactggaaacgcattatgagccacgtagagttacaaccgggttttgactttcagcaagcaggtaaagaagtcctggcgattgaacgtgaatgcctggcggagcttgatcaatacatcaatcagaatttcacgcttgcctgtgaaaagatgttctggtgtaaagggaaagttgtcgtcatggggatgggaaaaagcgggcatattgggcgaaaaatggcggcaacgtttgccagcaccggtacacctagttttttcgtccatcctggtgaagccgcgcatggtgatttaggcatggttaccccacaggatgtggtgattgctatctctaactctggtgaatccagcgaaatcacggccttaattccagtgcttaagcgtcttcacgtaccgttaatctgcatcaccggtcgcccggagagcagcatggcgcgcgccgcagatgtgcatctgtgtgttaaagtagcgaaagaagcctgtccgttagggctggcaccgaccagcagcaccaccgccacgctggttatgggcgatgccctcgctgtcgcgctgttaaaagcacgcggctttactgctgaagattttgcgctcagtcacccaggcggcgcactgggtcgtaaacttctgctgcgcgtaaacgatattatgcatacgggcgatgagatcccgcatgttaagaaaacggccagtctgcgtgacgcgttgctggaagttacccgcaaaaatcttggtatgactgtcatttgcgatgacaatatgatgattgaaggcatctttaccgacggtgatttacgccgtgtcttcgatatgggcgtggatgttcgtcagttaagtattgccgatgtgatgacgccggggggaatacgtgtgcgccctggcattctggccgttgaggcactgaacttaatgcagtcccgccatatcacctccgtgatggttgccgatggcgaccatttactcggtgtgttacatatgcatgatttactgcgtgcaggcgtagtgtaaagattcaaggataaacaacaatgagcaaagcaggtgcgagccttgcgacctgttacggccctgtcagcgccgacgttatagcaaaagcagagaacattcgtctgctgatcctcgatgtcgatggcgtactgagtgatggcctgatttatatgggcaataatggcgaagagctgaaagcgttcaatgttcgtgacggttatggcattcgttgtgcgctcacctctgatattgaagtcgctatcattaccgggcgaaaggctaaactggtagaagatcgttgtgccacattggggatcactcacttgtatcaggggcagagtaacaaactgatcgcctttagcgatctgctggaaaaactggcgattgccccggaaaatgtggcttatgtcggcgatgatctcatcgactggccggtaatggaaaaagtgggtttaagcgtcgccgtggccgatgcgcatccactgttgatcccgcgcgccgattacgtgacgcgcattgctggcggtcgtggcgcagtgcgcgaagtttgcgacttattactcctggcgcagggcaaactggatgaagccaaagggcaaagcatatgagtaaagccagacgttgggttatcattgtgctaagtctggcggttctggtgatgatcggcattaatatggccgaaaaagacgataccgcccaggtggtcgtcaacaacaatgatcccacctataaaagcgagcatacggacacgctcgtctataacccagaaggggcactaagctatcgattgattgctcaacacgttgaatattattccgatcaggccgttagctggtttacgcagccggtacttaccacgtttgataaggataaaatcccgacatggtccgtaaaagcagataaagccaagctgaccaatgaccggatgctctatttatatggacacgttgaagtcaacgcacttgtgccagactctcaacttcgcagaatcacgacggataacgcgcagatcaatctggtgacgcaggatgttacctctgaagacctcgtcacgttatacggaacaacatttaactccagcggtctgaaaatgcgcggcaacttacgcagcaagaacgccgagctgattgaaaaggttagaacatcctatgaaattcaaaacaaacaaactcagccttaatcttgtgcttgccagcagtcttctggccgccagcattccggcatttgccgtaaccggagacactgatcagccgatccacattgaaagcgaccagcaatctcttgatatgcaaggcaacgtggttacctttaccggtaatgtcatcgtcacccagggcaccatcaaaattaatgccgacaaagtggtcgttacccgtccgggcggcgaacaaggtaaagaagtgattgacggctacggtaaaccggcaacgttctaccagatgcaggacaacggtaaacccgttgaaggtcacgcttcccagatgcactacgaactggcaaaagattttgtcgttctgacgggtaatgcttatctgcagcaggtcgatagcaacattaagggcgataagatcacttacctggtgaaagagcagaaaatgcaggctttcagcgacaaaggcaagcgcgtaacaaccgttctggtgccgagccagctgcaggacaaaaacaacaaaggccagaccccggcacagaagaagggtaattaattcgttatggcaacattaactgcaaagaaccttgcaaaagcctataaaggccgtcgcgtggtagaagacgtcagcctgaccgtcaactccggggaaattgtcggtctgctggggccaaacggtgccggtaagaccaccactttctacatggttgtaggcattgtgccgcgcgatgcgggcaacatcattattgatgatgacgatatcagtctgctgcctctgcatgcacgcgcgcgccgcggtatcggctatctgccacaggaagcctccattttccgtcgcctcagcgtttacgataacctgatggcggtactgcaaattcgtgacgacttgtctgctgaacaacgtgaagaccgcgcgaacgagctgatggaagagtttcacattgagcacctgcgtgacagcatggggcagagtctctccgggggtgaacgtcgccgtgtagaaattgcccgcgcactggctgcgaatccgaaatttattctgctcgacgaaccgtttgccggggttgacccgatcagcgttatcgacattaaacgcatcattgagcacctgcgcgacagcggcctgggcgtgctgatcactgaccacaacgtgcgtgaaacactggcggtttgtgaacgcgcttatatcgtcagtcaggggcatttgatcgcccacggcacgcctacagaaatcttacaagacgaacacgttaagcgtgtataccttggggaagacttcagactctgatagggtagaagtttgcgacgttttagcaggagagtacgattctgaacatgaagcaaggtttgcaactcaggcttagccaacaactggcgatgacgccacagctccaacaggcaattcgtctgttgcagttgagcacgctggaacttcagcaggagctacagcaggcgctggagagtaatccgctgcttgagcaaatcgacactcatgaagaaatcgacacccgcgaaacgcaagacagtgaaacgctggacaccgccgacgcgctcgaacaaaaagagatgccggaagagctgccgctcgatgccagttgggacaccatttacaccgctggtacaccatccggcaccagcggtgactacattgacgacgagctgccggtctaccagggcgaaacgacgcagaccttgcaggattacctgatgtggcaggttgagctgacaccgttttccgacactgaccgcgctattgctacctctatcgtcgatgccgttgatgaaaccggttatctgactgtcccgctggaagatattctcgaaagtataggcgatgaagagatcgacatcgacgaagttgaagccgtccttaagcggatccaacggtttgatccggtcggtgtggcggcaaaagatctgcgtgactgtctgctgatccaactctcccaattcgataagaccacgccgtggctggaagaggccagactgatcattagcgatcatctcgatctgttagccaatcacgacttccgcactttaatgcgcgtcacgcgtctgaaagaagatgtgctgaaagaagccgtcaatctgatccagagcctcgatccgcgccccgggcagagcatccagactggcgaacctgagtatgtcattccagatgtgctggtgcgtaagcataacggtcactggacggtagaactcaacagtgacagcattccgcgtctgcaaatcaaccagcactacgccagcatgtgcaataacgcgcgcaacgatggtgacagccagtttatccgcagcaatctgcaggatgccaaatggttgatcaagagtctggaaagccgtaacgatacgctactgcgcgtgagtcgctgtatcgttgaacagcagcaagccttctttgagcaaggtgaagaatatatgaaaccgatggtactggccgatatcgcccaggctgtcgaaatgcatgaaagcacgatatctcgcgtgaccacgcaaaaatacctgcatagtccacgaggcatttttgaactgaagtatttcttttccagtcacgtcaataccgagggcggcggcgaagcttcctccacggcgattcgtgcgctggtgaagaaattaatcgcggcggaaaacccagcgaaaccgttgagcgacagcaagttaacctctttgctgagcgaacaaggtatcatggtggcacgccgcactgttgcgaagtaccgagagtctttatccattccgccgagtaaccagcgtaaacaactcgtttgacccaaccgataaggaagacactatgcagctcaacattaccggaaataacgtcgagatcaccgaggcactgcgcgaatttgttacagccaaatttgccaaacttgagcaatattttgaccgaatcaaccaggtctatgttgttctgaaagtggagaaagtcacccacaccagtgatgcaacactgcatgtaaacggtggtgaaattcatgccagcgcggaaggtcaggacatgtacgctgccattgatggcttaattgataagctggcacgccagttgaccaaacataaagataaactgaaacaacactaattgtccgggcaattagcatgtgcatggcggtctgttgtgcggcacaacgggccatttgtacggttaatgctccgagcctgttccactgtttgagtgggcaggttcttaggtgaaattatgacaaataatgatacaactctacagcttagcagtgttcttaacagggaatgtacgcgaagccgcgtccactgtcagagcaaaaaacgcgccctggaaatcatcagcgagctggcggcgaaacaacttagcctgccgcctcaggtggtttttgaagctatcctgacgcgggaaaaaatgggcagtaccggtatcggcaatggtattgccattccgcatggcaaactggaagaagatactctgcgcgccgttggcgttttcgttcagctcgaaacgcctatagctttcgatgccatcgacaaccaaccggtggacttactttttgccctgctggtgccggcagaccaaactaaaacgcacctgcatactctgagcctggtggcgaaacgtctggcggacaaaaccatctgccgccgtttacgcgcagcccagagcgatgaagagctgtatcaaatcattacggataccgaaggtactccggatgaagcgtaattattcggtaatgtctcttttagacgttgtgaggagaaacagtacatggtactgatgatcgtcagcggacgtagtggtagtggtaaatctgtcgccctgcgtgcgctggaagatatgggtttttactgcgtggataaccttcccgtagtgttgttacccgatctggctcgaaccctggccgatcgcgagatttctgccgccgtcagcattgatgttcgtaatatgccggagagtccagaaatattcgaacaggcgatgagtaacctgcctgacgctttcagtccgcaactcctgttcctggatgccgaccgtaataccttaattcgtcgttacagtgacacgcgccgactgcatccgctttccagcaaaaacctgagcctggaaagtgctatcgacaaagaaagcgatttgctggagcctctgcgtagccgagcggatctgattgtcgataccagtgaaatgtccgttcacgagctggctgaaatgctgcgtacccgtctgctgggtaaacgtgaacgcgaactgaccatggtctttgagtctttcggcttcaaacacggtatccctatcgatgcagattacgtctttgacgtgcgcttcttgccgaacccgcactgggatccgaaactgcgtccaatgacaggtcttgataaacctgtcgccgcgttcctcgaccgccacacagaagtacacaattttatctaccagacgcgaagctatcttgagctatggttacctatgctggaaaccaacaaccgtagctacttgacggtcgccattggttgtaccggcgggaagcaccgtagcgtgtatattgcagagcaactggcagactacttccgcagccgcggtaaaaacgtccagagtcgccatcgtacgctggaaaaacgtaaaccatgaccgtcaagcaaactgttgaaatcacaaacaagctgggcatgcatgcccggcctgcaatgaagctgtttgaattaatgcagggttttgacgctgaagtgctcttacgtaatgacgaaggcaccgaggctgaagccaacagcgttattgcgctgctgatgttggattctgccaaaggacggcagattgaagttgaagcgaccggtccacaggaagaggaagcactggccgccgttatcgccctctttaattctggttttgatgaagattaatcttcatcactttgacatacaactcccttcaaactccccccgacaataagaaaatcacgtactgaaatcgttctcaatcaacgtcatttgtacattttgtgcgcttttcactttcagaagaaccttaagaaaaccttaagaggcattgtttaggttttgtttaagttaatcgaccatactggagatcgtcagaaaatatttccaggagatggcatgattcgcttatctgaacaaagtcccctgggcaccggaagacatcggaaatgttatgcgcatccggaagatgcccaacgctgtatcaagattgtctaccatcgtggcgatggtggcgataaagagatccgccgtgagttaaagtactacgcgcatcttggtcgccggttaaaagactggagtggaataccgcgctatcacggtaccgttgagacggattgcggaaccggttatgtctacgatgtgattgcagattttgacggcaagccttccattacgctgaccgaatttgctgaacaatgccgttacgaagaagacattgcacaactgcgccagctactgaaacagctgaagcgttatttgcaggataaccgtatcgtgacgatgagcctgaagccgcagaatatcctctgtcaccgcatcagtgagagtgaggttatcccggtcgtctgcgacaacattggtgaaagcacattgattccactggcgacctggagcaagtggtgttgtctgcgtaagcaagagcggttatggaaacgatttatcgcccaaccggcgctggctattgccctgcagaaagatctgcaacctcgtgagagcaaaacgctggccctcactagccgcgaagcttaatccagctggtgttgttgcataaacggctcaccgcctaactgatacatctgccgtaaaatccacgcctgacggctacgcacgtagccgcttgggctggagactttgaaacgaagtggattaggtaatacagctgccagtaatgcagcttcgctccgggtaagtttgctcgcgggtttgtggaaataacgttgtgccgcagcttcgacgccaaacacaccgtcgccaaattcggcgatattcaggtaaaccgtcaggatacgctttttgctccagaccgtttctatccccagcgttaatccggcttccagcccttttcgaacccagctacgcccatcccataaaaagagatttttggctgtctgttgagaaatcgtactagcaccgcgaatacggttttcattgcgctcgttgtgcgccagggctttctcaatggaagcgacatcaaagccccagtgctcaggaaatttctgatcttctgcggcaatcaccgccagtcccatccacgggctgatttgatccatactgacccagtcagaatgtgccacgtaacgaaaattgccatgcagccaggcgctgacctgtcgctcgaccattaccgcactgaagggaacaggcgcaacgctaaacaacgcgatgcccccgccccagaaaacggcgaggacaaccattaaccgcaaaagaaaacggcgaacgaaactaaacaccgttaagcggcttttactcattcagccagaaccagcacgcgggaaaccagcttatcaatgccgctcgccgcttctgcaatgttctgcgccagcatatatgctggggtggtgacaatcttattgtcttcatcaaccacgatatcatcgacaggacacggcacatgctccgcgcccatctcttccagcacttctgcggtatcgatatcagtaccgatggtcaaacgcagcgggaaatcgaaaattttcggcagcatcgccggggcaatacacataaaaccaagcggttttccggcctgatgcatcgcttgtgccagcgcctttaattcacggtcaacggtgcattcgctaccaagactggcaaaattgcttaaattcttcgccgcgccaaacccccccggcacaatcaacgcatccagttcagcggcatcggcctgggccagaggacggatttcaccgcgcgttattcgtgccgcttcaatcagcacattgcgcgtttccgtcatcgcttcgccagttaaatggttgataacatcaacctgctgcttatccggtgcaaagcagaccgcctgcgcaccgctgcgactaatagctaacaacgtcaacaccgcttcatgaatttcagaaccgtcatagacgccgcatccgctcagaattacgccaattttcttcattgtgatcatcctttcgcaattgactgaaacacattaatttttttaataaaaatggtacgcatcacacatttaactgattcatgtaacaaatcatttaagttttgctatcttaactgcgtgcggcctgaaaaacagtgctgtgcccttgtaactcatcataataatttacggcgcagccaagatttccctggtgttggcgcagtattcgcgcaccccggtctagccggggtcattttttagtggcttttgccacccacgctttcagcacttctacgtcgtgacgccactcttctttcatctcttcaatccattcaccgacgttatcttcccaggccggaaggtcaggagactgaatttgctgacccagctgttgcagatggcgtaaccccacactccccgccgcacctttaattttatgtccttcctcaacaatgccttttttatcctgcgccgtcagattgctctccagcacgctgacatagcccggcatcatcttctcaaacaccgctaacccgtcggtgatcagcttcggtcctacaagttcgagatactgttccagcatgggaatatcgagcaatgcttcacttttactgttctcttctgtcgtcaccgtactctcctcatcatcctgggtatcccagaatttcttgatcatcgcggttagcgccggaacagaaagcggcttactcagcacatcatccattccagcattgaggtactcttgtttgtctttcagcacgttagcggttaaggccaccagcggcggtaaatcctcgcgcggataacgtttcgtcagttcacgagagatatccagcccggtcatatctggcaactgaatatccagcaacaccaggtcgtattcgcccggtttaaacatctccagcgccgccttgccggtcatggcgacatcaacgctgttacctaatttttccagcacagaacgcgcaacaatcacgttcagttcaatgtcttccaccagcagcacattcagcgccggtaaaggcatatcgtcttcatcaaacgcatcatcgacctcttctgctacgctcggtgcgtggatcgtcaacgtaaaggtactacctttgccctgttcgctggtaaccgtaatatcgccgcccatatttttcgccagacgacgagaaacggccagaccaataccggtgccggtggcaggtttaccgccatgactgtctttcacctggtaatacatggcgaaaattttatccagctcatcctgcggaatgccgataccagagtcttccacttcaaaatgcagcatatcgccttcatcgtagcgcacgcgcacggtaacctggccttgctgggtgaatttgacggcgttactgatgaggttccacaggatctgccgtaaacgcgtcccgtcggtaatgacctgatgcggtaatggcagcgtcggctccaggttaaagcgcaatcctttttgttgcgcctgcaatgcggagagattttccagatcggcaaggaagctggtgaaatcaaccggttgattatcaagctggaccttgcgccgttccatcttatccatgtcgataatatcgttaaagatattccccagcgtgacggcgctaacatggatggtcttgagatatttttcctgctcggcggtgagttcggtatccagcagaatgcggctcagaccgacgataccgttcagcggtgtacgcaattcgtgactgatggtggagataaacgtcgttttgtcgcggctggcccgttcaagcgcatcctgataccgcttacgctcggtaatgtcgcgaccaaagcccatcaaaccgtgacgtttacccacgcggtcgtagtacggcactttacggatttcaaagcaggctttgcgcccgtccgggtaatccagccactgttcataggtcagactcacattatgacggaacactttttcatcggtttcaatgacttttgcggcggcttccggactgtaaacatcagcaggtttcaggtgaaccagttgtttttcgctttttccggtcagcagctccatcgcgcggttacagccggaaaactctttatcttcgttacgataaaaaaccaggtcgggactagcatcaaggaaggaacgtaagaaactggattgctgctcgagctgaatttgtgtctcttcgcgctctttgatttcaattttcagttggccgaaggtttcctgcagttctgcttccgctttttcacgaacggcaatttcctgatttagctgggcaatattatcttttaactgaacgttgaggctcaaatcgcgctcgcgcatctcctccagtttttgcaccagccgactcagacgttgtcgactctcctccagttgctcgacgaccacgcttagaaagtagaccgcccacggcgtaatcagcaaaccaaagaagatagaacgaataacatcaatgctttcgacctgaccatgcagcaccatggttaccgccatttgtaccacaatggcaagaacgacgagggccagcgccagcaacatactgaagcgcaccagacctaacttcatcatcaggtcaacataatactgcgccagcagacgaatttgcttcattagggaattccttcacgacaacctgccccaataatacccaattctgacagttacgttataaattgtgtgagaaatgcggaattcccctcaacgacttactccgttggaggtagccacggacgtcccagcgcgcttccctgtacgccatgttcattcagatagcgatccagctcgaccattcccgtccatcgattttcgcaccacagcggagcaagcagcgtcgggcgacgggcgctggcggaaatgcggtggtagatcacttccggtggcgtatggcgaatcatttctccggcagtgagcgtgtaatcctccagttcaataccgttcaaacgccccgcttcccaggctttcgccataatgctgcctttcacaatatgcagcggatgcagctttatgccgtccacgccggtttcaaccactcgctccagcgtttgcaaacattcagcctgcccttcgccaggcaggccgacaattaagtgggaacacaccttcagcccgcgctgacgtgccagctgggttgtacgctgataacaggcaaaatcatggccgcggttgatgcgatgcagtgttttgtcgtgggcggtttgtagccccagctccagccacacttcgtaaccctggtccttatattcgcaaagcagatccagcaccgcatccggcacgcagtccgggcgggtacccacacacaaaccgacaatattggcctggctcaccgcctgctgatacatagaacgcagcacctgaacttccgcaaaggtgctggtatacgcctgaaagtaggccagatagcgtttagcgcggttaactaaattcgcctggtgcgccagttgctcggcaatggaacgatgctgctgcgcttcatcggcaaagctggcaacattacagaatgtgcagccaccacgcccgatggtaccgtcacggttagggcagctaaaaccgccgtgcagcgtcagcttatgcaccttttgcccataacgacgggtgagatcaccaccaaacatattgactaatttctgtaactgcataatctgatagaccgcgccttgaaaagaggccaaagcctgccatttttagctcaattcggcgatgacctggatcaatcgtcccggcctgcttttatcaactgcataatcaatcaaaattaccgaaatttcatgcataatcacataaatcacttttgcttatcttgtgtcagatttttttatctcctgatggattttaggcaaaaacagtagcatgaaacgtcattaccaattaaggcagtataaaatgctggttttgtcgtcagttcaaggcaggataagggttaacacacctttatgacagtcaggaattgactgtttctctaacgacttcccttttagccttaaagataaaatccattttaatttcagtcatttaataaagaattttgcgctaaagcacatttctgtaccaataagcttgccatttgacctgtatcagctttcccgataagttggaaatccgctggaagctttctggatgagcagcctgctcatcatatttatgcagtaattgagatcccctcttcaccgtattaaccgatgcgaaaaggacaacaagggggcgaatgcgaggcgcgcgtatgacacgcaaaccccgtcgccacgctctttctgtgcccgtgcgcagcggtagcgaagtggggttcccgcagagcctgggggaggttcacgatatgttgtacgataaatcccttgagagggataactgtggtttcggcctgatcgcccacatagaaggcgaacctagccacaaggtagtgcgtactgcaatacacgcactggcccgcatgcagcaccgtggcgcgattctcgccgatggtaaaaccggcgacggttgcggcttgctgttacaaaaaccggatcgcttttttcgcatcgttgcgcaggagcgcggctggcgtttagcaaaaaactacgctgtcgggatgctcttcctgaataaagatcctgaactcgccgctgccgcacgccgcatcgttgaagaagaactgcaacgcgaaaccttgagcattgtgggctggcgtgatgtccccactaacgaaggcgtgctgggtgaaatcgccctctcctctctgccacgcattgagcaaatttttgtgaacgccccggcaggctggcgtccacgcgatatggagcgccgtctgtttatcgcccgccgccgcattgaaaagcgtctcgaagccgacaaagacttctacgtctgtagcctgagcaatctggtgaacatctataaaggtctgtgtatgccgacggatctgccgcgcttttatctggatcttgcggacctgcgtctggaaagcgccatttgcctgttccaccagcgcttctccactaacaccgtaccgcgctggccgctggcgcaaccgttccgctatctggcgcataacggtgaaatcaacaccatcaccggtaaccgccaatgggcgcgtgcgcgtacttataaattccagacaccgcttatccctgacctgcacgacgccgcaccgttcgtcaacgaaaccggctctgactccagtagcatggataacatgctggaactgctgctggcaggcgggatggatatcatccgcgccatgcgtctattagtaccacccgcctggcagaacaacccggatatggacccggaactgcgtgccttctttgactttaactccatgcatatggagccgtgggatggcccggcgggcatcgtgatgtccgacggtcgttttgccgcctgtaacctcgaccgtaacggtctgcgtccggcgcgctacgtcatcaccaaagataagctcatcacctgcgcctctgaagtcggtatctgggattaccagcctgacgaagtggtcgaaaaaggccgcgtcgggccaggcgaactgatggttatcgacacccgcagtgggcgtattctgcacagcgcagaaaccgatgacgatctgaaaagccgccatccatataaagagtggatggagaaaaacgtccgccgactggtaccgtttgaagatctgcccgatgaagaagtgggtagccgcgaactggacgacgacacgcttgccagctaccagaaacagtttaactacagcgcggaagagctggactccgtaattcgcgtactgggcgaaaacggtcaggaagcggtcggtagcatgggcgatgataccccattcgccgtgctctccagtcagccgcgcattatttacgactacttccgccagcagtttgcccaggtgactaacccgccaatcgacccgctgcgtgaagcgcatgttatgagcctcgccaccagtatcggtcgtgaaatgaacgtcttttgcgaagcagagggccaggcgcaccgtttaagctttaaaagcccgattctgctctactccgatttcaaacagctcacgacgatgaaagaggagcactaccgcgcagatacgctggatatcacctttgacgtcactaaaaccacgctcgaagcgacagtcaaagagctgtgcgacaaagccgaaaaaatggtacgtagcggcaccgtgctgctggtgctctccgaccggaatatcgctaaagatcgcctgccggttccagccccgatggcggttggcgcgatccagacccgtctggtcgatcaaagcctgcgttgcgatgccaacatcatcgtcgaaaccgccagcgcccgcgatccgcaccacttcgccgtgttgctgggcttcggcgcgacggctatttatccataccttgcctatgaaacgctgggccgcctggtagacacccatgcgattgccaaagattatcgtaccgtgatgctcaactaccgtaacggcatcaacaaaggcttgtacaaaatcatgtccaaaatgggcatctccaccatcgcctcttaccgctgcagcaaactgtttgaagcggtcggtctacacgatgatgtagtgggcctgtgcttccagggggcggtcagccgcattggtggagcaagctttgaagacttccagcaggatctgctgaatctgagcaaacgtgcctggctggcgcgtaagcccatcagccagggcggtctgctgaaatacgtccacggcggcgaataccacgcctacaacccggacgtggtgcgcacgctgcaacaagcggtacaaagcggcgagtacagcgactatcaggaatacgcgaagctggttaatgagcgtccggcaaccacgctgcgcgatctgctggcaattacgccgggtgaaaacgcggtcaacattgctgatgttgaaccggcaagcgaactgtttaaacgctttgataccgccgcgatgtctatcggcgcgttaagcccggaagcccacgaggcgctggcggaagcgatgaacagcatcggcggtaatagcaactccggtgaaggcggcgaagacccggcgcgctacggcaccaacaaagtgagccgcatcaagcaggtggcttccggtcgctttggggttactccggcgtatctggtcaatgccgacgtcattcagattaaagtcgcccagggcgcgaagccaggcgaaggcggtcagttgccgggtgataaagtcacgccttacatcgccaaactgcgctatagcgtgcccggagtgacgctgatctccccgccgccgcaccacgatatctactctatcgaggacttagcgcagctcattttcgacctcaagcaggttaacccgaaagcgatgatctccgtgaagctggtttccgaaccgggagtaggcaccatcgcgactggcgtggcaaaagcttatgcggacttgatcaccatcgcaggctatgacggcggcaccggcgcaagtccgcttagtagcgtgaaatacgcaggctgtccgtgggagctggggcttgttgaaacccagcaggcgctggttgctaacggcttgcgtcacaagatccgtttgcaggtcgatggcggcctgaaaacgggtgtcgatatcatcaaggcggcgattctcggcgcagaaagcttcggcttcggcactggcccgatggtggcgctcggctgtaaatatctacgtatttgccatctgaacaactgcgcaacgggtgtagcaactcaggatgacaaactgcgtaagaaccactatcacggcctgccattcaaggtgacgaattactttgagtttatcgcccgtgaaacccgcgagctgatggcacagcttggcgtaacacgtctggtggatctgattggtcgcaccgacctgctgaaagagctggacggtttcaccgccaaacagcagaagctggcgctgagcaagctgctggagactgccgaaccgcatccaggtaaggcactctactgcaccgaaaacaacccgccgtttgataacggcctgctgaacgcgcagttgctgcaacaggcgaaaccgtttgtcgatgagcgccagagcaaaaccttctggttcgatattcgcaacaccgaccgttctgtcggcgcgagccttagtggctatatcgcccagacgcacggcgatcaggggctggcagccgatcctatcaaagcgtacttcaacggcaccgcaggccagagcttcggcgtgtggaacgcgggcggcgtggaactgtacctgaccggtgatgccaacgactatgtcggtaaaggcatggcgggcggcttaatcgccattcgtcctccggttggttccgccttccgcagccatgaagcaagcattatcggcaacacctgcctgtatggcgcgaccggtggtcgtctgtatgccgcaggccgcgcgggtgaacgtttcggcgtgcgtaactccggtgctatcaccgtggtagaaggcattggcgacaacggttgtgaatatatgacgggtggtatcgtctgcattctgggtaaaaccggcgttaacttcggtgcgggcatgaccggcggtttcgcttacgttctcgatgaaagcggcgatttccgcaaacgcgttaacccggaactggtcgaggtcttaagcgttgacgctctggcgatccatgaagagcatctgcgtggtcttatcaccgagcatgtgcagcataccggctctcagcgcggtgaagagattctggcgaactggagtaccttcgccactaaatttgcgctggttaaaccgaagtccagtgatgtaaaagcactgctgggtcaccgtagtcgtagcgcagctgagttgcgcgtgcaggcgcagtaaggggtagcaacaatgagtcagaatgtttatcaatttatcgacctgcagcgcgttgatccgccaaagaaaccgctgaagatccgcaaaattgagtttgttgaaatttacgagccgttttccgaaggccaggccaaagcgcaggctgaccgctgcctgagctgcggcaacccatactgcgagtggaaatgcccggtacacaactacatcccgaactggctgaagctcgccaacgaggggcgtatttttgaagcggcggaactgagccaccagaccaacaccctgccggaagtttgcggacgagtctgcccgcaagaccgtctgtgcgaaggttcctgcactctgaacgatgagtttggcgcggtgaccatcggcaacattgagcgctatatcaacgataaagcgttcgagatgggctggcgtccggatatgtctggtgtgaaacagaccggtaaaaaagtggcgattatcggcgcaggcccggcaggtctggcgtgtgcggatgtcctgacgcgtaacggcgtaaaagccgttgtcttcgaccgtcatccagaaattggcgggctgctgaccttcggtattccggccttcaagctggaaaaagaggtaatgacgcgtcgccgtgaaatcttcaccggcatgggtattgaattcaaactcaataccgaagtgggccgcgacgtacagctggacgatctgctgagtgattacgatgccgtgttccttggcgtcgggacttatcagagtatgcgcggcgggctggaaaacgaagacgccgatggcgtgtacgcagcgctgccgttcctcatcgccaacaccaaacagttaatgggctttggtgaaacccgcgacgaaccgttcgtcagcatggaaggcaaacgcgtggtggtccttggcggtggcgacactgcgatggactgcgtgcgtacgtccgtgcgccagggagcgaagcacgttacctgtgcctatcgtcgtgatgaagagaacatgccgggttcccgccgcgaagtgaaaaacgcgcgggaagaaggcgtagagttcaaattcaacgtccagccgctgggtattgaagtgaacggtaacggcaaagtcagcggcgtaaaaatggtgcgtaccgaaatgggcgaaccggacgccaaaggccgtcgccgcgcggagatcgttgcaggttccgaacatatcgttccggcagatgcggtgatcatggcgtttggtttccgtccacacaacatggaatggctggcaaaacacagcgtcgagctggatagtcaaggccgcatcatcgccccggaaggcagcgacaacgccttccagaccagcaacccgaaaatctttgctggcggcgatatcgtccgtggttccgatctggtggtgaccgctattgccgaaggtcgtaaggcggcagacggtattatgaactggctggaagtttaagcgaggtaacaatgaattcgccagactgtgtctggcgaatcaaattactgacgaagtgcgcgttgttttctggcaaatgcggcatgagcgtttgacctttcctataatagggataattttcaataaattgtgctttgttcaccaagtctgatgagtgaagcacatcaagcaatttctcatttacaatccgtctcaattacttgttaacacctctgacaataccgattctgcaagctattcagtcttttcattccatgtaaattgtctcgatattaatatacaaaatatgaatataaaaaaccaatatattatccttaattatctatatattttcctatttttcagcgcaaacattcatgtaatgaataattatcaccacaaaccacctcaccagcaccttattattcacatgatcgtaactataaaattcattaaataaatacatcccagcaagttggctatttctgaacgagttatttatttacattcacaaacagatatatatactgcttcagctttttattttaaaaaataaatttgttattaaggatatgttcatatgtttttcaaaaagaacctcacaacagctgctatttgtgcagcactttctgttgcagcattcagtgccatggcaacagatagtactgatacagaattaactatcatcggcgagtatacccctggtgcatgtaccccagttgttacgggcggcggcattgttgactatgggaaacatcataacagtgcgctgaatccgaccggtaaaagtaataaactggttcaactgggccgcaaaaacagcacattaaatataacctgcacagcaccaacgctaattgctgtaacctccaaggataaccgtcagagcaccattgtagcgttaaacgacacatcctatattgaaaaagcttatgatactctcgtagatatgaagggaacgaaaaacgcctttggtttaggttctgcgcctaatggacaaaaaattggcgctgcatccattggtattgacaggtctaatggtgggattcacgcggcggacgatacaggtgaaattcctgtcgacctgattcaaactgaccactggagtgcagcgacccccacatggaaagccagttctaatggcgcattctgcagcctgacaagttgcagtgcaatcgagcgcggttattctgttgcaaaaacaggggaactgacacctgttgctattacagcggtcaccttcccgttactgattgatgctgcggtaaatgacaatactattcttggttctgatgaaacgatcaaactggatggtaacgtcactatcagcgttcagtatttataagaacttgtaatacagtttttatttttacgcattaaccagttagctataactcggacagattatgccctatgacatggtctgtcttaatcaatctcatcgcaaacagtgcataacatatattaacaatatgtttctgcgttatttatcattattacaggagttttaatttaaatgctcagacacattacattcactgtatttataacaacatcaatgaatactaacaatgccggacaggagtactatcaggcattcgttttatacgatcggttaatgtttcaggaaagctcttcgcatatcttggggaaagtaaatgtaatacgctgttcttaattgttcagtgctcaccccccagagtatagctcattccattattcaacttagctccatataaagggacagataatggaaagcctcagtgaaggaaccacagcaggctaccagcaaatccacgacggtattattcatctggtcgatagcgcccggacggaaacggtacgtagcgttaacgcgttaatgaccgcgacgtaccaggaaattggccgacgaattgtcgaatttgaacaaggtggcgaggccagggctgcgtatggtgcgcagctaatcaagcgactaagtaaggatttatgtctaaggtataagcgtgggttctctgcaaaaaacttacgccaaatgaggcttttttacctcttttttcaacatgttgaaattcaccagacaatgtctggcgaattaacaccattgggaattccgcagacaccgtctgcagaattcccaagcgcaaagatttggcagacgctgtctgccaaatctttccccttgcccaggtccacctacgtccgtttactttccgttaaaaacgctgacgcccgcagcttttatgaaaaagagacgctccgctgtggctggtctgttcgccagctagagcggcaaattgcgacccagttttatgagcggacactactgagtcatgacaaaagtgccatgctgcaacaacacgctcctgccgagacgcatattcttccgcaacaggcgatacgcgatccctttgtgctcgaatttctggaattgaaagatgaatatagtgaatccgattttgaggaggcgctgatcaaccacctgatggatttcatgctggaacttggggatgattttgcctttgttggtcggcagcgaaggttacgcattgatgacaactggtttcgtgtcgatctgctgtttttccaccgccgtttacgctgcctgctaatcgtcgatctaaaagtgggcaaattcagctatagcgatgccggacagatgaatatgtatctcaactacgccaaagagcactggacgctaccggatgaaaatccgcccatcggtctggttctctgtgcagagaaaggagccggagaagcgcattatgctctggcaggtttgcctaacaccgttctggcaagcgaatataagatgcaactacctgatgagaaacgactcgcagatgaactcgttcgaacacaggcggtgctagaggaaggctatagacgccgttaatttcagcggtttcgaattctgcagacagtgtctgcagaatctttaaaacgaactaagttttaagccattaaatcagccttaaccttcaccacaacctttttaatctctccaggctcgccgacaacgcatcctggtttatgcggttcacctggcataaacacggcgaacattcccggttttaagatgatggcttgctcgttatcaatggtgctgcaaagctgataatcatcctcatggtggaactcttcacactgacgcgcagtgcctgccatgccaaacagaatccgttcctcaccgtttaataacagctggatatcaatgtattgctcgtgcaattccgcttttttctcgacggggctttgagtgttaaacgtcatgacattcataaagatattgtcgccctgtaattcgtaacgacccggcgctttttcttgcggtctggcagctaatgccagcgttaacgcgtcctgtaacgcaggatgtaacccagcagacggtaaactctgtacttcacccatcatcataatttttctccctgggccaacagcgcagccccaagtaaacctgcatcatggcggtaatgcgccgccagtaaatcaacatgaaatgccgctggctcctgcgccagatacgtttccaccagcgccagatacccttctgccagaccaacgctgccaccgaccaccacgcactggcaatcagttgtggctttaatatcagcgatcagccttgcaagcgtacgtgcggagcggtgaatcagctgctgcgcctgctcgtcaccctgcccggcgcgcgtgaaaatagttttcgcatccgcgccagccaactccccctgcgctgccgctgcaatgccgcgaccagaagcaatcgcttccacgcaacctgtgcgtccacagccgcagactgggccgtgtggatcggcaagcgtatgcccgatatgccccgccagaccgccagggccggtaagcagtttgcagccgctcactacaccgccgccaacgccggtggaaacggtgataaagaccatatcggttatatcgccatccagcgcctgaaactccgcccatgctgcggcctgcgcgtcgttaatggcaatggtcggcaaattggtaagttgttccagcgttttgactaacggaaagtgtagcaatccaccaagattatgcggattaagcgccagcaagctgccgtcacggattatcccggtgctagcgatggcaacccgctgcgcatgagcttgcaacggagagactaatgcggataaggcatcacgcaaggcttctggtgtctggctggctggcgtaggaagttcacgacgatcgcggatctgcccgtcagcgccaatcagcgcggcggcaagtttagtaccgccgatatcaatcgccagtgtggtcatagcaccgcctttttcatcgctgtgttgtaccactgacaaatgtgctcaagacgcgtgattgcagaaccgaccgtcaccgcccacgcgccgtggcgcatcgcatccgccgcctgagcaggcgtgttgtaacgcccttcggcaatcacccgacatccggcgtcgctcaacgttttcaccagcgccagatccggctcttctggcgtttcaggcgtggtatagccagaaagcgtagtgccaataatttcggctcccagcttttggcatgccaggccgtcttccggcgtactgcagtcggtcatcgccagtaaaccgtgatggtgaatacgtgccagcagcgtttcaacaggcaccggacgcgggcggtcggtgccgtcaatggcgataatgtccgcgcccgcctgcgccagcgcatcaacatcttcaatataggccgtgatgcgtaccggagaatcctccagatcgcgtttcacaattccaataatcggcacgctcaccaccgcacgcgtggcttgcagatttgccacaccttcaatgcgaatggcaaccgcgcccgcctgttctgccgctaatgccatggcggcgacgatttcgggtttatcgagcgggctgtccggaaccggctggcaggagacaatcaggccaccgttagcagcgattttttgatccagttgtgcaagtaagctcatacatcttcccttagcgaaaggcccggtacatagaccgggcaacaggattaacttttggttttgactaaatcgtttttggcgctgccaaacggcacggcaccgctgaatggtttaccgtcgatagcgtcatgagtacgcaacgcttccgggcgcaaccaacgctgaacgcgagaaggcatatccagcccaatcagcaggatcaccacgaacgtcagactgaagctgaggcttgccagcgcagtacccagatccagacgttgagcgatcaacgcgccgatgattggggccagtgcaccgcccaatgcgccaacgttgtaggtaaagcccaggcccgctgcacgctggtcggtatcgaaataaccgccaatcagttttggtaagatcccggcgatcccttgtccaagcatttgctggaagaacagtaacagaccgagcacccagacgtttgcgccgccaatcgcaaataccggaataatcagcagctggctggccagcaggctacaaacgtacgctttgcgggttcccagccagtcaccgaggaagccacctacgcagcatcccaccgccgcgccaaagccactaaagaacagcacattggctacagtatgcgggttataagccagatcggttttcagatacgttggcagcagcgcctgaatcggccaactgtagaggaaagcaaacaacacgaccaccatcagcattacgcccgttggccagcgtttgcctgcactctgcaccataaagctgataaagattgcggcgcataacagcccaagaacagcgacgatcgcggcattttgcaggttaccggcgaagcagaaccacagcgcagtagccgccgccagtgtcattacgatattggcaatgcgatgttcaccacggtagagaatatccaccattgtgcgtactggtgctttacctgcgtgtttctctttccagtcttccgcttccgggatgtttttacgcagccagagagcaaagatgattggcaaaatgccgataaagaacagcgcacgccagccccagaccggaaccaccaggctatagacctgagcggcaacgacggcccccacagagaagccactaatcaaaaaaccactggctttgttacgcagatgttttggccagctttcaatgacataggtggcgctggaaccgtattcacccgccatccccatgccgatgaccagacgagcgataaacatggtgatgtagcctggcgcaaagccgcaggccagcgtcccggcgctgaagagaacgatgctggtgaccattgccagacgacgcccgtagcggtcacccatagcgccgagcatcaggccgccgaaccagcgagagataaaggctgcagagatcagacttgccgcctgcaccgtcgtcagcccgaattcaccttgtacttcggtgagtaccagggcgattaaaacgaaatcaaaaccgtcaagcagatatcccaaccaggcagcggaaaatgcgcgccattgtgcacggttgagatggcgataccacgggatattctgggttgtagtactcattgtgagtctcccgcggtgggcgatgcccacacgctttggtatgaaaattgtagggtacagatgcgtttatttcccctcacccggtaggggcgagcgaggggaaacaactcacccgcgctcttgcatcaactgctgggccagcgccttcagttctggcagatatttttcatctaccggtccaaacggtttgcggcacagcggcacagaaacgacatccatataatggaggacagttttcaggccgcggaatacgcccgttttgatcagtaaatcaatgactttattgcattcagtttgcagtttctgcgcggtctggatatcgccttctttcagcgccttaacgatcccctgatagcgccagcccatgatgttgtaggtactgccgataccaccatcagcgcccgccagcagaccagaggcgaagatttcgtcgtaaccgttatagagcacaagatcaggatgttcacgacggatctgctccatctgatagagatcgccagaggtctgtttcagcgcacctacgccaggcaatgtaacaagtgtgttgatctgatccagggtcagttttaccccactcagggctggaatgttgtacaccaccatcggcaaaccatccgcgctatcaataattgcccgatagtgatcgcagtgttcttcaaagctgaaaggatagtagaacggcgtgacggcggagacggcatcgaagccataacgtttagcgcttgccgcaagttgttggctttcggcggtgctgacgcaaccgacgtgggcgatgagtttaatcttacctttcgcctcttcggcgacgatttccagtacctgttcacgctcggaaaggctttgtacaaaggcctcgccggtgctaccacccacgtataaaccgtcgatgccctgctgaatattgaactgaaccaggcgacgcagactcgctttatccagtgcttgttgttggtcaaaaggagtcaggagtgcagccattacgccacgtaaattcgttgccataaatacctctgaagtgatgcttgtctgataaacgatatacctttatacctgttataccagatcaattaagcaacaccccatacagaaagcttataatgcgatctgcttcactaaagtggcattatttctttttgttggtggtctgaccgaaagcgtgccaggtagcagagacgctgttgagatggctttgcaacgcacgatcggcttcgtcaggatcatgacggcggatcgcatcaacgatcgcaatatgctgttgataactaacgttgttatgttcgtgcagtgcctgatcggtaaccgttgggcgtgcggcaataagccagtcgagcagggcaacgtggatcgccatgaagattgggttaccggggatctccgccagcacgcggtggaaatcaacgtcactacgaatgaatgccgcgttgttatccaggctctgactgttgatttccagtgcttttgccagcaaatcgatttgctcatcggtggcatgttcagccgcatagcgcaccagactggattcaaagaacagacgtaattgttcgaaatgggcaatcccaccgggatgagaaaggaaatctttcgccatgccggaaagctcaccgatgatagtgtccgcagaaggacggctgacgcgagcgcgttcgccgttgtttatttgcaccagacctttgcgttttaacgctgccagcgcttcacgcacgctaggacgcccgacgttaaagaacgccatcagttcgcgttcagacggtaattgttcaccttcgccaaattcacgacggcggatcatctgttccagctcttcttccaccatttcggagagttttttacgcgccagcgggcggctacgcaagttgcgaccaattgcaggactagaatcttcggtttggctatcaaatgcgttcataaggcccattctgtaaggtcagtgtgattaacatcatcagtgacatcctatcacaggattgaaagtaggggaaaatggcagggttttctctttgtgcctcatcattaccataattaacggaataattaactattgcgaaaaattaatgtaacgcagataaaaacatcccgtttgaattatttataagactattcacgagcattatgaatattatgaatgtgttcttacaaaataatcataagcgcatattttttaatgaaaaatcacctcacctacaattaaaaacacgacatccgcaccataaatagccttgcaaaaaatataacatcgttgttttcaatctgccgtttatgggattgaccgttttcttttgacacggagttcaacaatgttcggcataattatatctgtcatcgtattaattacgatgggctatttgatcctgaaaaactacaaacctcaggtggtgctggctgccgcaggtatcttcctgatgatgtgcggtgtctggttagggttcggtggtgtactcgatcccaccaaaagcagcggctacttgatcgtcgatatttataatgaaatcctgcgcatgctgtccaaccgcattgccggattggggctgagcattatggcggtgggcggttatgcccgctacatggagcgcataggggccagtcgcgcgatggtgagcttgttaagccgcccgttaaaactcattcgcagcccgtatattattctgagcgcaacttacgtcatcggccaaatcatggcgcagtttattaccagcgcctccggtctgggtatgttgctgatggtcaccttatttccgacgctggtgagtctgggagtaagtcgtctctctgcggtggcagttatcgcaaccacgatgtccattgagtgggggattctggaaacgaactccatttttgctgcccaggtagcgggaatgaaaattgccacatacttcttccactaccagcttccggtcgcctcttgcgtcattatcagcgtggcgatctcccactttttcgtgcaacgcgcttttgacaaaaaagataaaaatatcaatcacgaacaggcagagcaaaaagctctcgataatgtcccgccgctctattacgccattttacctgtgatgccgttaatcctgatgctcggcagcctgttcctcgcccacgtcgggctgatgcagagtgaactgcatctggtggtggtgatgttactgagtttgactgtgacgatgtttgttgagttcttccgcaagcataacttgcgcgaaacaatggacgatgtgcaggcgttttttgacggcatgggtacgcagtttgccaacgtggtaacgctggtggtcgcgggtgaaatatttgcgaaaggcttaacgacgattggcactgtcgatgcggttatcaggggggcggagcattctggtctgggcggtattggcgtgatgattattatggcgctggtcattgccatttgtgccattgtgatgggctctggcaatgcgccgtttatgagttttgccagtcttattccgaatatcgcagccggactacatgtaccagcggttgtaatgattatgccgatgcattttgccacgacgctagcgcgcgcggttagcccgattactgcggtggtggtcgttacgagtggaattgcaggcgttagcccttttgcggtggtgaagcggacagcgatccccatggcagtcggtttcgtggtgaatatgattgccacaatcacgctattttattaagtcattaaaaagacaaaacaggccgcctgggcctgttttgtattacttcacaacgcgtaatgccggtcgaccaccgcgtggtggctgcggaggttcatcgtcaggatgagtgtcatcatcgtgatctggcttgtcgccatcaataacgctcataacggtttcgttgtctgcgcttgcctcttcatcattcatgatgctggtatcttcatcgtaggcagcttcaggctcaaacatcgtgcctgcgccattttcacgggcgtagatagccagcacggcagccagcggcacagaaacctgacgcggaatgccaccaaagcgcgcgttaaagcgcacctcatcattcgccagttccagattgccgacagcacgcggcgcaatgttgagtacgatttgcccgtcacgcgcatattccataggaacctgcacgccagggagcgtcacatccaccaccaggtgcggcgtgagctggttatccagcaaccactcatagaatgcacgcagcagatagggacgacgtggtgttagctgactcaaatccatacagattaactccggcccagacgcatttcacgttctgcttcagttaaagaagcaaggaaagagtcacgctcaaagacgcgggtcatatagcctttcagctctttcgcacccgggccgctgaactcgatgcccagttgcggcagacgccacagcagcggagcaagatagcaatcgaccaggctgaactcatcgctcaggaagtacggcttctgaccgaagaccggcgcaatcgccagcagttcttcgcgcagttgcttacgtgcggcatctgcttcagaagcactaccgttgatgatggtgttcatcagcgtgtaccagtctttttcgatgcgatgcatgtacagacggctttcaccgcgagctaccgggtaaacaggcatcagtggcggatgcgggaaacgctcatccagatattccataatgatgcgagattcccacagggtcagctcacgatccaccagggtcggaacgctctgattcgggttgaggtcaatcagatcctgaggcggattgtccttttccacgtgttcgatctcgaaacttacacctttctcagccagcacaatgcggacctgatggctatagatgtcagtaggaccggaaaacagcgtcattacgctacgtttgttggcagcgacagccatgaaaacctccaggtatagtcagaatttttactgctaccagccaccaggtggccagtcagaagttgtgttacccaataaggaacgactctctttgttcgaaaatcaaacaaaaaatgagcaatacccgacatttgggcagaaaattggatgatagtttaccagattttgcgaccattgtggtgagtcgatgccggaaatggggaaaaagagatgcgctttagtctgaaatagttgacttagtcccttattggcgatgtggtttttgttttacctgtctgtcaggtggcagcaaaaagcaactttccagtttttacgctgattcagattttagctataaaaaaacccgccgaagcgggttttttcgaaaattgttttctgccggagcagaagccaattaacgtttggagaactgcggacgacgacgtgctttacgcagaccgactttcttacgttcaacctgacgagcgtcacgagtaacgaagccagctttacgcagttcagaacgcagggactcgtcgtattccatcagagcgcgggtgataccgtgacggatcgcaccagcctgaccagagataccaccacctttaacggtgatgtacaggtccagtttctcaaccatgtcgaccagttccagcggctgacgaactaccatgcgggcagtttcacgaccgaagtactgttccagagaacgttggttgattacgattttaccgttgcccggtttgatgaaaacgcgagctgcggaacttttgcggcgaccagtgccgtagtattgattttcagccattgcctataatcccgattagatgtcaagaacttgcggttgctgtgccgcgtggttgtgctcgttacccgcgtaaactttcagtttacggaacatagcacgacccagcgggccttttggcaacatgcctttaaccgcgatttcaatcacacgctcaggacggcgagcaatcatctcttcaaaggtcgcttgtttgataccaccgatgtggccggtgtggtgatagtacactttgtcagtacgcttgttgccggttacagcaactttgtcagcgttcagaacgatgatgtaatcaccggtatctacgtgcggagtgtattccgctttgtgcttaccgcgcaggcgacgagccagttcagtagccagacggcccagagttttaccggtcgcgtcaacaacataccagtcgcgttttacggtttctggtttagctgtaaaagttttcattaaaagcttacccaataaatagttacacgttggtgaacacccaaacgtcttcaattgttgaggttcacacgacaaagtccggcaaacctaccccttcgaatagcctatgccagcacacaaaaagttttgggaaaaaaactttcttgtaacgtggggtcgcaggattatagagaagtcggggtcaaagatcgacccctttttgtgatttgtgacaggttttaacccgccaaatgctcgcgcttcagatactcttcgctttgcatctcttgcagacgactcaggcaacgctggaactcaaacttcagccgatcgccctgataaatttcatacagcggcacttctgcactcaccactaatttgacatggcgctcgtaaaactcatccaccagcgcaataaagcgccgcgcttcgctctccatcaaccgcgtcataactggtacatcaaacaacatgaccgtatgaaagagacgactgagcgcaatatagtcatgctgactgcgggcgtcgacgcacagcgtagtaaaagagaccgccagcgtctggttctcgacgcccattgttgctaatggccgatggttgatttctaacgtcggactattttctcgtttcccccccgccagcgccaaccatagtttatccatttgcgcccgggtttcatcgtgaagtgggctaagccacagatgcgcctgagtgagtgtacgcagacgataatcaacaccagcgtccacgttcattacatcacaatgctgtttaatggcatcgattgcaggcagaaaacgcgcacgttgcaggccatttcgataaagttcatccggcggaatattactcgtcgctaccagggtaataccgcgagcgaacagggctttcatcagaccgccaagtagcatggcatcggtaatatcagaaacaaaaaattcgtcaaaacagagcacgtcagtttcggctttaaagcgatcggcaataatttccagcggatcggtctgcccctgtaaggcagttagctcttcatgcacccgcagcataaaacggtgaaagtgcaggcgctgtttccgctctcccggcaggctttgatagaaaaggtccatcagccaggttttcccgcgtcctacaccgccccacatatataagccacgcactggcgtatgctttgtgtcttcgcgtttaccccacagcttaccgacccgcgccattagcccactcgtcctgggggctggtggcgtgctattgatgagttcctgataaataatttccaggcggctgacggcctctttttgaacgtcgtcgggttgatggctgccttcattaagcgccttcaggtattggcttgttggggtaacgctttgcatgatcttattgttattccttgaataatcggtgcgccgttgttcacggttgacgaaaaaaaggccgttctacactacgcgatatgcagtcgggattccacttctgtggaattaacggttatagtggcataatcagccgcaggcatggagcctgaagccaacaccctacggaaacaaaagacaacgggagatgttcatgacctgggaatatgcgctaattgggttagtcgtcggcatcattattggtgctgtggccatgcgttttggtaatcgtaaactacgccagcaacaggcgttgcagtacgaactggaaaagaataaagctgaactggacgagtatcgcgaagagctggttagccactttgcccgcagcgcggaattactggataccatggcgcacgactatcgccagctgtatcagcacatggcaaaaagctccagcagcctgctgccggaactgtctgctgaagcaaacccgttccgtaatcgtctggcagagtctgaagccagcaacgatcaggcaccggtgcagatgcctcgcgactattctgaaggcgcatccggcctgctgcgtactggcgcgaagcgcgactaatttatttttcgggcgcagccattgcgccctcctcttctctccctccccgactatcatttaatctggtgtctcattgttagccgtctgaaaattcaataacatcaaactgttttgaatctcttttcttatcattcaggtacgagagcaggaataatgaaaaaacaaacccagctgttgagtgcattagcgttaagtgtcgggttaactctcagcgcgagttttcaggccgtcgcgagcattccaggccaggttgccgatcaggcccctctccccagtctggctccaatgctggaaaaagtgcttccggcagtggtgagcgtacgggtggaaggaacggccagtcagggacagaaaatcccggaagaattcaaaaagttttttggtgatgatttaccggatcaacctgcacaacccttcgaaggtttaggctccggtgtcatcatcaacgccagtaaaggctatgtgctgaccaacaaccatgtgattaatcaggcacagaaaatcagtattcagctcaatgatgggcgcgagtttgatgcaaaactgattggtagcgatgaccagagcgatatcgccctgttacaaattcaaaacccgagcaaattaacgcaaatcgctattgccgactccgataaattgcgcgtcggtgattttgccgtagcggtcggtaacccatttggccttgggcaaaccgccacctctggcattgtttccgcattaggccgcagcgggttgaatcttgaaggtctggaaaactttatccagacagatgcttccattaaccgcggtaactccggcggtgcactattaaaccttaacggtgagttaattggcatcaacactgcaatccttgcgcctggcggcgggagcgtcgggattggatttgccatccccagtaatatggcgcgaacactggcgcagcagcttatcgactttggtgaaatcaaacgcggtttgttaggcatcaaaggcaccgagatgagtgccgatatcgccaaagccttcaaccttgacgtgcagcgtggcgcgtttgtcagcgaagtgttgccaggttctggcagcgcaaaagcgggcgtcaaagcgggcgatattattaccagcctcaacggcaaaccgctgaatagctttgctgagttgcgctctcgtatcgcgaccaccgagccgggcacgaaagtgaagcttggcctgctgcgtaacggcaaaccactggaagtagaagtgacgctcgataccagcacctctagcagcgccagcgctgaaatgatcacgccagcgctggaaggtgcaacgttgagcgatggtcagctaaaagatggcggcaaaggtattaaaatcgatgaagttgtcaaaggaagcccagctgctcaggctggcttgcaaaaagacgatgtgatcattggcgtcaaccgcgatcgggtgaacagcattgctgaaatgcgtaaagtgctggcggcaaaaccggccatcatcgccctgcaaattgtacgcggcaatgaaagcatctatctgctgatgcgttaatgtcgtaaaccgggcatcaggcttacgtgtgatgtccggttaactcgtggtatgctgctgccgttcccttttttaatgacgcctccatcatgtttgtgaagctcttacgttccgttgcgattggattaattgtcggcgctattctgctggttgccatgcctagcctgcgcagccttaacccgctttccactccgcaatttgacagtaccgatgagacgcctgccagctataatctggcggttcgccgcgccgcgccagcggtggttaacgtttacaaccgtggtttgaacaccaactctcacaaccagcttgagatccgcaccctgggatccggtgtaatcatggatcaacgcggttatatcatcaccaataaacacgtcatcaacgacgccgatcagatcatcgtcgccttacaggatggacgtgtatttgaagcattgctggtgggatctgactctctaaccgatctggcggtacttaaaattaatgccactggcggtttacctaccattccaattaatgcacgtcgcgtaccgcacattggcgacgtagtactggcgatcggtaacccgtacaacctcgggcagaccattacccaggggattattagtgccacgggtcgaatcggtctgaacccgaccgggcggcaaaacttcctccaaaccgatgcttccattaaccacggtaactctggcggcgcgctggtgaacagcctgggcgaactgatgggcattaatacgctgagctttgataagagtaacgatggcgaaacgccggaaggtatcggctttgcgattcctttccagttagcaaccaaaattatggataagctgatccgcgatggtcgcgtgatccgcggctacattggtatcggcggacgtgagatcgcaccactgcacgcgcagggcggtggtatagatcaactgcaagggatcgtggttaatgaagtgagtcctgacggcccggcggcgaatgcgggtattcaggtcaacgatctgattattagcgtggataacaaaccggccatctctgctctggagacgatggatcaggtggcggaaattcgccctggtagcgtgatccctgtagtagtgatgcgtgatgataagcagttaacgctgcaggtcaccattcaggaatatccggcaaccaattaagtcgtgcgctcaaaacaaaaaaccggagtctgtgctccggttttttattatccgctaatcaattacttattaacgaactcttcgcccagggcgatatctttcttcagcgtatccagcataccttccagcgcgttctgttcaaatgcgctcagggtaccgatagatttacgctcttccacgccgtttttacccagcagcagcggttgagagaagaaacgggcgtactgaccgtcgccttcaacgtaggcacattcgacaacgccttgttcgccctgcagtgcacgaaccagagacagaccaaaacgtgcagctgcctggcccatagacagggttgcagacccgccaccggccttcgcttcaaccacttcagtacccgcgttctggatgcgtttggtcagatcagccacttcctgctcggtaaaactaacgccaggaacctgactcagcagcggcagaatggtaacaccagagtgaccgccaataaccggcacttcaacttcgcctggctgtttgcctttcagttccgcaacaaaggtgttggaacgaatgatatccagcgtggtaacgccgaacagtttgtttttgtcataaacaccggcttttttcagcacttcagcagcaattgcaactgtggtgttaaccgggttagtgataataccaatgcacgctttcgggcaggttttcgcaacttgctgtaccaggtttttcacgatgccggcgttaacgttaaacaggtcggaacgatccatacccggtttacgcgctacgcctgcagagataagaacgacatctgcgccttccagcgccggagtcgcatcttcaccagaaaaacctttgattttcacagcagtagggatatggctcagatcgacagccacaccgggagtcactggagcgatatcatacagagagagttcactaccactaggcagttgggtttttaacagtagtgcaagcgcctggccaataccgccagcagcgccgaggactgcgactttcatcctaaactccttattatattgataaactaagatatgttgctccgctgccgcgaccttaatccacaaaattgccgtttacaatgaccacatctcaagaatgtgtagtcacgcaagtttagcgtttatgcatttaattgccgtaatcaggaacctaacttacgtaattaacagtcgcttatgcattagcgcaacattccaacaggtggtgacaatataccctaccgttcagccaaaacaacatcaatttgataacaattaatttacttttaagcagaatttgcatgccgtgacgcaggcatgtttctcaataacgaaatttgataaaatcccgctctttcataacattatttcagccttcttcagggctgactgtttgcataaaaattcatctgtatgcacaataatgttgtatcaaccaccatatcgggtgacttatgcgaagcagcgctaagcaagaagaactagttaaagcatttaaagcattacttaaagaagagaaatttagctcccagggcgaaatcgtcgccgcgttgcaggagcaaggctttgacaatattaatcagtctaaagtcagccggatgttgaccaagtttggtgctgtacgtacacgcaatgccaaaatggaaatggtttactgcctgccagctgaactgggtgtaccaaccacctccagtccattgaagaatctggtgctggatatcgactacaacgatgcagttgtcgtgattcataccagccctggcgcggcgcagttaattgctcgcctgctggacagtctgggcaaagcagaaggtattctgggcaccatcgctggcgatgacaccatctttaccacccctgctaacggtttcacagtcaaagacctgtacgaagcgattttagagctgttcgaccaggagctttaatctctgccccgtcgtttctgacggcggggaaaatgttgcttatccctctcaaccccctgctttcccctgcgattaatttaacgaatagtgcgttttactgcgacatgtcattcacacaatgaatacataaggtaaaaaaagcacattatgcaaaattcattatctaattgaaaaaactagaattaacgataaataaccgtatttttaattcttttttgttattaaaattcacatttttaacacttagtatcaactgaaacagttagcgcggtattaattagctcaataattagtgtatacttgattttgtgatatgggtcacgaaacaaaggcccagctaaaagattatgtcgaggtaaaaatcatgaaaatcaaaaccactgttgctgcattaagcgtactttctgttctctctttcggtgcattcgctgccgactccattgatgctgcacaagcacaaaatcgtgaagcaatcgggaccgtatccgtaagtggtgtggcgtctagcccaatggatatgcgtgaaatgctgaacaaaaaagcggaagagaaaggcgcaacggcctaccagattactgaagctcgtagcggtgacacctggcacgctacggctgaactgtacaaataaaccctcatcgtcttgtccgacgatattgcccccggttcgggggcttttttttgcgttaatgacgaacattaaaacgcaaatgcccttccagctcttcctctgcctcatcaaacagcaatattaacgcgccaaaacggcgacgcgttttctctcccagatgaacaaattcaatctcaagtggtagcggcaggacatcgttcattaacacatcccatagactgtcgagatcgcgtaccttatctttcgccagaccaaaggtttggctaaagtcacgataaaaatcctcctgactctcaatctcatcaaaatcaaaggtataaatattcatctgttgccaccgtcacgtttcgcggcgagttctgccgtgcatcgctaagtatagccatgaaaaaaccgacgcttttggcgtcggttttgacttaactatcggtcaacgcatgttgatacttatggagcatccccgccagccgatttaccggttccgtcacctgcggtggcgcttgccagatgcgtagcttttcctggtagatttccagttcttccagcaactggccaaagtaccgacgacgtttatcatcgctacgggcagatatcacatggtctgctgtgcggcgcatttgtcggtgaaacgcgcttaaatcctcgttaaccgggatcggtgcatcacgcaggcgctggtgcgcgataatcatcgtcagcgccaggcgaaatttcggcaaatcccctgggaacttattcatcagcaaaaacagctgctgataaagtgccgggaggtggttctctttacgacgtgccacattggtagtcatcgcggaaacagcggcagaaacaaactgattaagcagtacacgtccggtcctgtcgcggcttttatcccgcaccagcaaaataacggtgaacgcgagcacacagccgacgatttgccctaatgcgctgtcgagaaactgactgaaatggaaagtcatcgggttatccagcacgataatatttatggtgctggccagtgcccccatgctgcccagtcgccgtttctgtacttctataccgaggaagaatcccagcactgccaggctaatgcacagcagcaacatgctctgttgggtattagggataatcaccaaaaagtagagcagccctaacggcagcgcggccagcgtcccgtagataaagtcgatcgccaccatgcgtggattcggcaaacgcattgccagactcgtcactaccgcaatcatcaccattgcaccactgccggaagtccagcccgtccacagccagaaaagcgtgcccagaatgcaggaaagtgtggttcgccagaagttaaccattgcatgatgacgttcggcactctctacttttacttccggttcgccttgcaggatctcttcttcggtggcgttgatttttgtgttactgataacgccgcgcttgagaagctgataacgcgttgccgccgcgacccagctataaatggtgacaggcgtttcccgttccccggtccaggcgataactctccgcaggcgtttgagctgcttgtggacgtcctgcgcggtttctaccggcgtgtcaaaaaattcgcggaaagtatcagtgatcaattccgggcgcgtattctgaataagataagtttcgcaggattgggtaatcagcgtcaggcttagcgtattgatcgcttttaaacgtcgattggcccgcgcccagcgggaagattccatattcaggttgctgcgcatgccttgtagcgccgtggtgcgtcgcaccaggtcgccccaggctttatcgacaacttcaccatcgccatgcttgatacagagttgcattaattgatattgcgcgaccagcaaactttccagctctcgatccacttcttgtttgatgcttcgcggagaaaagagcaaatccgccataatcgcacacacaataccgataacgatctcgctacaacgttcgacggcaaactgcggcgtaagcaatggttccggctgaatggtgatcacaatgatcagcgcggtataaccggccagcccccacgcatagctgttttctattcgtaccaggctggatatccaggtacaaaaaccggcccagatacagcacaccagaatcatcaataatggtgcgcggatcatcgcaatgatgatcaccagtccggcaatacagccaataaatgtgccgatgatgcgcaaaaagccacgatagcgaatagcgccagaatacggttcacctcccgcagcaaaggccgtaccggcggcaacaatcgccgctgtcagtaccgcccagcgtggcgtttccagctggaagtgaaagccaacaaacagcgccagtacaatggcggtcgccagttttaccgcaaagcgaatatgttggttagcaatggagaaaatacccatcgtgattaaccaaactcacgcaggcgatgggccattttacggaagaagctatcctggctttcgtcgcgatcttgtttgccagtgaccaccactgtagcagtggtgcccgcaggccagatgttctcttgctggttgtcgagacgaatacgaaccggaacacgttgcgcaagacgcacccattcaaggttagagtctatagtcgccatccctttgtcgtcacgcgtgctgctggcgttggtgacccctgcggcaacactatcaacagtccctttcagcactttgttactgccaagcggcgtgatctctgcacgataccccggacgcaccccttccagcttagtttcttccatataggccagtacatagaaggagttctgtttcaccagcgcaaccgccgtacttcctcgagtaataaactcaccggtatagacgttgaggttggtcacccagccatctgctggcgcgcggatcaccgtgcgttcaagatccagttttgccagatcgcgggtcgcctgcgctttcgctaactgatgcagaaccgtttgtagtacgttgttggcctggtcgatctcttcgcgagacatcgcctgcacaccgagacggttacgacgtccggcctcctggcgtttctcctgtgccagtacctgataataagcaacatcggcttgcgcttcctcaagcgccttttgatagcgcggctggtcgatggtgaacagtatctgtccttttttcaccagctggttatcatgaacattcacctgggtaatgagtccagaaacgtccggcgcgatcgcaacgacgtcagcgctaaagcgcgcgtcacgcgtccagggggattcggtgtaatagacccaggcattaaaaattgcgatgaaggccagaatgactaatacgaccgtgatggccgtacgggagaattttcttattagtgttttcacttcaacctcaaacgaacagtcggcttatcaaataaaacaagcagcaatagagcgcggtgttgaacaacgccggatgccagacaaagtcgtagatacctgttggcacaagtacccggcgcaccagccagaaaatcgccagacttaaaagcaattcaaaaaatatcggtgggaaggacagcccaaacaccacgataacgggaaacagactcatgttgaccttggttgtaaagagagagcaggcgttattattttcagcatctgtcgccgcagagaagggcatggaaagccgggcgagagcaacattgctgtagattgatatttaatatattagcgtaactgttatgctgttatctatattatgtgatctaaatcacttttaagtcagagtgaataatggaacgactaaaacgcatgagcgtgtttgccaaagtagttgaatttggctcttttaccgccgccgccagacagctacagatgagcgttagctccatcagtcagacggtaagtaaactggaagatgagttgcaggtaaagctgttaaaccgtagcacacgcagcattggcctgaccgaagccggtagaatttactaccagggctgccgtcgtatgcttcatgaagtgcaggatgttcatgagcaactgtatgccttcaataacacccccatcgggacgctacgcattggctgttctagtactatggcacaaaatgttctcgccgggctgacagccaaaatgctgaaagaatacccaggtttgagcgtcaatctggttaccggaattccagcccccgacctgattgccgacggtctggatgtggtgatccgcgtcggcgcgttgcaggattccagcctgttttcccgccgtctgggcgcgatgccaatggtggtgtgcgccgcgaaaagctatctcacacaatacggcataccggaaaaacccgccgatttgagtagtcatagttggcttgaatacagcgtgcggcccgacaatgaatttgaactgatcgcaccggaagggatcagcactcgcctgatcccacaaggaagatttgtgactaatgatccgatgacgctggtgcgctggctgacggcgggtgccgggatcgcctacgtgccgctgatgtgggtgatcaacgagatcaatcgtggggagctggagatcctgctgccgcgttaccagagtgatccacgcccggtttatgcgttatataccgaaaaagataagctgccgctgaaggtacaggtcgtgatcaacagcctgacggattattttgttgaggtcggtaaattgtttcaggagatgcacgggcgcgggaaagagaagtaattcatattgtactgttacgttgtacaaacctgtgccaacgggttcccctcaccctaaccctcaccccaaaggggcgaggggaccgttcgtgcacgtagaaagattaattatccttctgaaaatagtgaaattattacgcagtaccgccaacagtcaggttatcgactttcaacgttggctggcccacgccaaccggcaaactttgcccttctttaccgcagacacccacgccgttatccagtttcaggtcgttgccaaccatgctaatctgctgcatggtttcgataccggaaccaatcaacgttgcgcctttcaccggcttcgttactttaccgttttcaatcagatatgcttcactagtggagaaaacgaatttgccggaggtgatatccacctgaccgccaccaaagttcggtgcatagataccgtactcaacggattcaataatttcctgcggggtgcttttacccggcagcatataggtgttggtcatacgcggcatgggcagatgggcgtaggattcacggcgaccgttgccagtcggcgtcatccccatcaaacgcgcgttgagtttatcctgcatgtagcctttcagaatgccgttctcaatcagcacgttgtactggcctggcgtaccttcgtcatcaatcgccacgctacctcggcgatcgaccatcgtgccatcatcaaccacggtacacagttcactagccaccagctccccgacctgtccactaaatacactagtgccacggcggttgaagtcgccttccagaccgtgaccaaccgcttcatgcaacagcacgcccggccaacctgcgccaagtactaccggcatggtgcccgctggtgcagcaacggcagaaagattgaccagcgccatacgcactgcttcttttgcccatgcatccgcacggacttcgccgtcgagatcggcaaggaagaattcataaccaaaacgaccgccgccgccactggcaccgcgttcgcgtttgccatcttcttcgacgagaacgctcacggaaagacgcaccagcggacggacatccgccgctagcgtgccgtcggtggccgcaaccaaaattaattcatagacaccactgaggctggcagtcacttcctgtacgcgcttgtccgcttcgcgggcaaccttatcgacgcgacgcaggatatccagcttctcttcacggctcatgctttgcagcggatctacgctggtatacaacgggctatgctctaccgcgcccagcgtctgtactttaccatcaccactatcacggacgatggtgcgcgccgcttgcgcactctgttccagcgccagcaggctgatttggtcagcgtaagcaaatccggttttttcaccgctgattgcacgcacaccaacgccctgatcgatgttgtaagaaccatctttaataatgcggtcttctaaaacccaggattcgtgatagctgctctgaaaatagagatcgccataatcaaggcgacgttcggccagttgaccgaggatcgcgaacaagtcctgatgtttcaggccgttcgccgctagcaattgttcacttaccaggttaagactcatcgtttttgctactcgttagttactgcagtagaggattttttacggctgccggatgcggcgtgaacgccctatccagcctacggttatgttccggtttgtaggcctgataagacgcacagcgtcgcatcaggcaacggctgtcggatgcggcgtaaacgccttatccgacctacggttatgttccgtttgtaggcctgataagacgcacagcgtcgcatcaggcaacggctgccggatgcggcgtaaacgccttatccgacctacggttatgttccgtttgtaggcctgataagacgcacagcgtcgcatcaggcaacggctgccggatgcggcgtgaacgccctatccgacctacggttatgttctggctcgttggcctttggcaacgattatcctatgagattggggcaattacgcgccctcgtcaaatcattgcgctttttctttacgcggttggcgcaacacttcgttgatttgcggatcgtccagcggaccgctaatgtgatagcgcaaaatggagactttgctccacagcggccccagcactttactggcggcaaacactgccgcgccaacaatggggttaaccgcaaaagccgcagccacgcccaccgtcgcagaaatctctggtgcgacaaccgcttccatattcaggtcgcgacgtaccagatttacgctccctttcatggcgatatccgcctccaggccatccaccagcgtgtcgtcggtgtgcataacgccgtctttaatccacgcggtgctgcgaatggagtcaaaatagaacccttcgccaaaagtgtctctgaaatcaaaacgcagcttacgcatcagggcatctacgctcaataagcgcagcaattgcccggcatgtccggtattgatttcggtaatttcgcctttacccagttgagtatgaatgatgccattcaacgtcgcttcatctggctgccagggtgctttgcgccagtgtaaatcgtaatccacattaaaactgctctggcgtatgggcgtcgtgacaccaaaaaattctgcggcggcatcaattttctgcccgcgcagttttcctttcaggctggtacgttcattccccggattattaacccattcaccatcggcagtaagccggctgaaaccagtatcaatcagtccattggtcagcgttaacgtatcgccagaaatggtgatatcactgtcaatgcgaccgaatttttgcccccagaaccagcactctgtgcatcgtatttgggcgtccggccagccacggaagttaatgcgctccgttgtcgggaaaggactactcggcgtactatcaccacgagttttcgccacgctcgggttgtaataaagatatttgatattcgccagccacggcgcgttattacgcatcgctagcgtggcgttgatttcacgcccttgcgcttcaaccagggtgccatttgccgtcggttggctaacaatactcaggttattccattgctgatttcccagactcaacataggcgtacgtaacgttatgtgttgtgggaaactcgctgcaccaccgacactctccgcagcgcctttctggaacagggccagccactcggcaccattcatcggcggcatattgagttcaacgccactttgttccggcaacggcgggagcgttttactgtctgccgcccaaatagcacgatcgagcgtcagcttttgaccgagcaaccagcggctattgaaatgattatccgcaccagcctgtccggttaattcaaagctgttgagattgccatcaaccttaacgtttaccgctagtggttcacccgcaggtttggctaacggactaggtaagtgactgctcacattctttagatcgccgttcagctctatgttataggtcgcaccagcatgataaggcagatcaatgcccactttaccatcccacgccacgctgccactcaatgcttcgttcaccgcttcaggcagaacgccggttttcgccggttgccagttaccgttgaggtttaccgctacctggtaggcttttgccccttctttggtggaaaaatccacgttcaacggctgattaaaccagcttgctgtcagtggttcactttgcagatcgctattgataaagctgaatttaccgctcaaatttttcagggtgctgtcgagtggtttgataaacagactgttattacgcagcgtcacttcacctttcgcggttaccagttcgccgttcagcgggatatcaagatgtaagcgagcattcacatcgccgtcgagctggagttcttgcagggtcgcacccagagaatctttcagcggtgtctcatcaaagtaagggccaacggctttacccggacctttaatgtcagcgtcaatcagcagtttttctttactgtagtcagggatcactgcggtaagattactcgcgcgcacgccgcccagattaacgccatcggttttcatccataaaccgtcgttaataaagtccagttcaatatcaaggttagttaatgcaggccagtccggctggaaggcaaacttcgcgttgcgcagcggcaccagcacttcaaactgaccttcgttgtgtttataggggaagagttgcggattgccaccataaaccagcgtcgcgttatccgcttcaccgccctgaatcgcgccacttaagtaatcaaccaggtctttacccatcaagttttccgggaaatagcgccaggcttgactaccatcatcggtactgatgccagccagaatacccagccagggttcatcgttagcaggttgcaggtaacgaaaaccgccgcgcgcatggacggctttggctttaacgtcaatattacgcccatccagctggaaacctttgttattgttcagccagcttatagttgcctggccgtcggcgatttctagtggcgcacggaataccgtttcgtaaggcatctttgcctgcttcatgctcgcggtaagcaaaccattttcaacgctgccggaaagcgtcccggagaagtgttccgcacccggtaataatttccattgcttccaggccagatcgctccagcttgcctgaaaacgggtcttgtctgccgcctgaagcgggatatccagcgccagagtgttaatcttgccgctcggttgtgtggagcgccaaacatcacccagtgcaggactaagtttcgcggccagcgggcgtatgccctccaggcctgccagctccagattactggcgcgaatccggagttcgtcactgcgtttattgtctttgccgccaacgtcctgttccggtatccaggccagcgtcaatgctccgctcggccagggtttgccgtccatcgtgatccgtgtatcgggaatagagaactgccagcccggattttcacgcgtaatatgcgcggtcagattatccacgctcagcgtatgcgtttgcttctcgcccaaccagctggcaccgccctgtttcagccagacgtcaccgccggttacatcgcctttgtcgatcgtcatccagccttcaagggagaactgtgccgtttccagcgcaatattgtcctgcatccatttaccgagccacggcttcaggtcgatgtcatccgcctggagccagacgcgaccattgcttaacaacccctcatcatcgcgcaaatccatgcgcacctgcatcacgccgtgctgtccggtaaggctggagaggcttaccaggccttccgcacggtgtcgacgtggatcgttcagccaggtgagttgtgggatcgccagctcggcgcgctgaccggatggcgtcaggaaactgacttcactgtcgcgaagatcgaaatggtcaaattgacgaagaaacagatcgctgatgtgactggcttccagactgtcatcactaccaccgctggtgataggagtgttggtgcgaaagcgcagctgccagaaagtgaggtcgcgaaactgccagcgcatatgtaacaggctctgccagacatccagcgccagagtaacgcgtttaacgctaaattcgccgccatcttttagttctgcacggatgtcgtgtgcttcaagcgtcgggccaaaattctgccagctggcactgagctgactggcttctaccggcatgccagtcgcggattctattttgttgaggatttccggacgccaggcgtcaagatgcggtaaagcaatacgcaggccgctaaccagcagggcagcgatcacaacgagcgcggctccagtaagcagtaaaatccccggcaatcgcctcacccgtcactccttgtctgctaaaaatgtgactcaaaaaccctttgccggatggcggcccagcatctgtttacatcattacgacgtcaaactgctcctggttatagagcggttcaatttgtactttaacctgtttgccaacgaaaatttccacttccgccaggctgtgactctcttcgcctttcaaggcttcagctactgccggagaagcatagaccaggaaacggtcggagtcgtaagcatggtggacacgaacaatctcgcgcatgatttcatagcataccgtttccacggttttcaccgttccgcgaccgtggcaggttgggcattcgttacacagtacgtgctcaatgctttcgcgggtgcgtttacgcgtcatctccaccagccccagcgcgctaaaaccattaacgctggttttcacccggtctttgctcaacgcctgctccaggctgtgcagcactcggcggcggtgatcttcattattcatatcgatgaaatcaataatgataatcccgcccagattacgcaaccgtaactggcgagcgatagcctgcgtcgcttcaatattggtattgaaaatggtgtcgtccagattgcgatgaccgacaaacgctccggtattgatgtccacggtggtcatcgcttcggtctggtcgataatgagataaccaccggatttcagttctactttgcgttccagcgctcgctggatttcgttttcgacatcaaagagatcgaaaatcggctggcgtcctgtgtaatgctccagcttgcttgtcatctcgggaatgtactcgctggtgaactcaagtaacgcttcgtaagtcaggcgactgtcaacgcgaatgcggtccagttcggcatcggcgaaatcacgcagaacacgctgcgccagcgccagttcgccgtacagctgataacgggtctgcgggcgttttttacgctccataactttggtccagacgcgtttcagataagcggcatcggaggccagttcagcctcgccaaccccttccgctgcggtacggatgataaacccgccctgctcgtcgcaatactctgcgaccacttttttcaggcgttcacgttcactttcgctttcaatacgttgggaaaccccaacgtgagaagcccctggcataaacaccagatagcgagaagggagcgtgatatcggtggtcaggcgcgcacctttagtgccaagcggatctttcaccacctgcaccatcagatcttgcccctgacgaaccagttcgctgatgtcgcgcaccgtgaattgcttttgttcttcacccgccacacattcggtgtgcggcatgatgtcggatgcatgaagaaacgcggctttatccagcccaatatctacaaaagccgcctgcatacccggaagtacacgacttacacgacccttgtagatattgcctactattccgcgtcgcgcctcacgttcaatatgaatttcctgcagaataccgccatcaatatacgccactcgcgtttcgctaggcgttacgtttactaacaattcagccgtcatgtttatcccttttctcacgcagtgcgttaaaattacttaataattcatacgtttcaaccagcggtaagccgactacggcgtgatagctgccatttatcttcctgacaaaacagccacccagcccctgaataccgtatgcacctgctttatctaacggttcatcgctggcgacatagcccgcgatgtcttcgtctgttaacgttctgaaagtcacatcggtgaccaccaggcaatcgagaatgtgctggctgtcggccaacgccactgctgtcatcacctgatgggtctgaccgcttaatttgcgcaacatctgcgccgcatgctctgcgtcgcgcggtttctccagcacttctccgttcaggataacgatagtatccgcacccagcaccgggagatccttcgccgtttgcgcgacacctgcccgtgctttctcgcgcgccagacgcacaacatactgctgcgcgctctcctgcggctgacgctgctcctcaatgcccgtaacaatacgttcaaaggtcacgccaagttgcgcaagtaactcctgacgacgcggagaaccggaagctaaatacagagaagtcatagaaacctttattgcactgcaaactgctgacggactttgcgcatcagcaagaaaatccacggccagagcaccccattgactacactactccagaacacttccggtctgaaagagacgttaatcactaaaaactctgcccagaaaacaataatatccaccaccaggctaagcaacatgacgaccagcgcctgctgccataatgcgaggttgcggaaaagctggtatttcagcgccaccaggtaagcaatgatgctcatcgccaatacgcgtacgccaagcgtgctgccgctgatcagatccagtatggcacccatcacaaaacctgtgcccacatttacgcgatgaggcaaggccaggatccaatacaacaagatgagtaacacccagtttggccggaaaacaatcaggttatccggccagggcatgatttgcagcaacagcgcaatgaggaaagagagccagattacccagcgtccctggctacgatagctcgccactattgccctcccggcgcacgttattgccctcccggcgcacgcgcaggcggttgagcaccactttgcggcggcgtagccctttgtggagagcgattagcagcaggctgtgtcggcgcagcaggcgcagtagctgcatttcctgtcgccggttgctgcggagtcggctgagcgatccccgttgccggttcaggtaactttggccccatcgcgtctgggctaggcaatacctgcggcatcatctgcatcagacgttcattagcaacacgatgcacctcttccggcgtcatcgggttagcgccgttacgatctgccccccacagcagcagcagataacgcaaacgttgcagccctgcagtcggacgcgcctgaatcacagtataagcgcgctgggtatcgagttttacggaagagacaaccgcgaccggatagccttccgggaaacgaccgcccagaccggaagtcaccagcacatcaccaacacgaatatccgtattcgccggcagatgctcaagctgcaaatcatccgtacaaccgttaccggctgcaattacgcggatatcgttgcgcagcacctggattggcagcgcgtgggtcgcatcacaaatcagcagcacgcgactggtcagtttagcgacggccaccacctgaccaacaacacctttgtcgctgatgaccggctggccttcataaacgccattaacgctacctttatcgataacaacttgatcgctataaggatcgttaaccgtggagataacctgagtcaccattttctgctcatcctgacgcagcggggaacccagcagctcgcgcagacgcgcgttctcctgtttgtattgtccaagcatcagcagttcactgtttttcagcaacagttcctgacgtaacgcccggttttcaagttctaattggtcacggctggccagcgtctggcttacgccatccagcaattcacgaggagcattggaaacaaagtagaaaggactgacggcggtatccatataagtacggatttgactgaacgtccccaggcggctgtcggcaataataatgccgagcgccaccagcaccgccagaataaggcgaatctgtaggctcgggccacggctaaaaattggcttcataagttatgcgtattctcgtatcagaccaggcagggtaaacagacacttcccctgcctgcatccgattactcttcgctgaacaggtcgccgccgtgcatgtcgatcatttccagcgctttgccgccaccgcgcgccacacaggtcagcgggtcttcagcaacaacgactggaatgccggtttcttccattaacaaacggtcaaggttacgcagcagtgcgccaccaccggtgagcaccatgccgcgctcggagatgtcggaagccagttccggcgggcactgttccagtgcaaccattaccgcgctcacaataccggtcagcggttcctgcagtgcttcgaggatttcattggagttcagggtaaaaccgcgtggaacaccttctgccaggttacggccacgaacttcgatttcacggacttcatcgcccggataagcgctaccgatttcgtgcttgatacgttctgcggtggcttcaccgatcagagaaccgtaattacgacgcacatagttgatgatagcttcgtcgaaacggtcaccaccaatgcgcacagaagaggagtaaaccacaccgttcaaggagataacagcaacttcagtggtaccaccaccgatatcaaccaccatagaaccggtcgcttcagaaaccggcaggccagcaccaattgcggcagccatcggttcttcaatcaggaagacttcacgggcaccagcgccctgcgcggattcacgaattgcgcggcgttcaacctgggtcgcgccaaccggcacacaaaccagaacgcgcgggcttggacgcataaagctgttgctgtgcacttgtttgatgaagtgctggagcattttttcagtcacgaagaagtcggcgataacgccgtctttcattgggcgaatggcagcaatattgcccggcgtacggcccagcatctgcttcgcgtcatgacctactgcagctacgcttttcggactaccggcacgatcctgacgaatggccaccacggaaggctcattcaatacgatgccttgtccttttacataaatgagggtattcgcagtacccaggtcaatggacaagtcattggaaaacatgccacgaaattttttcaacatactaagggataatcctgaaagctggggcggaaaagaaaatccgcttactttaccaaccacacgcagcagcgacaaggcgcaaaaatcatctgctacggtgaaaattagtgcagttcgtttcctttgttacaaatctctgcctgagtccagaaaggcttaatgcatcagcagcattcctcgcctgtttgcaaccgcgtaaggtcattcatctgcatatgtgctgcaacaatctggcgagcagacaagcacactcccatgagacgcagcgcgcattattctacgtgaaaacggattaaacggcaggttaaacgctgtatctttgactatattttttcacgttagtatcaagtggctgactggacgcgaaaaaatccccttgcccgcctgtaacaccgcgctgaatcagggtctgccactcgcttcggctacgcacgccggtggcgtaaacctgggtgctggtcccggagcaggcttccaccaggctttgaaccagcagctggttctccgttcgcttctcaatgtttctgaccagccccggatggagcttgagtaactcaacattaagttctttgatccaactggtacttaccagcgtcaaaccagcctggttgacggctacccgtacccctaaagcattcactaaacgaataacaggttgtaaacgactgatatgttgacctacatcggcctctgcaagttcaataattatgcgttttcgttgacttttttcacattgcattaacgtatcgcgcagccaacgctgaaaacgcgggcgaatcaggctctcaacggtaacctgaatcgccagattttcctctggccagtaacgcaatagtggaataagacggctgatttgcagacggtcatactcttcgcttaagccaaactgcaagaccatcggcatatactccgcgctgctaacctcttcattaccatcgaagatgcggcacatgagttcgcgatgatgaacctgaccttcgcgagtaaccgccggtttttgataaaggcgcgggccgccgcgactgagcatttgctcgataagcgtacgccagcgaacattaccgcgtcctttttcaggcaagctgtcatcgtaaatagcccagctattgccgccctgcaatcccgcattacgcgtggcagactctgcatgttccattacctgctcggtatcctgaccactacgccaggcgcagataccaatgtggatcatatcgtcgcgatcgagcattttattgttcggcaaggtatcaacggctttgattaactgaccggcgatgctctctgcctcttttaacgtccggtgcggtaacagcgcagcaaaatcactgcggtggtaacgcgccagcagtgcgccagggtagcgcatcataaatgtgctcagcagattcgtcagagtgaagaactgttcttcaacctggctgtgcccccaggtatcgctcaacatattgaaatccggcagacgaatcatcatcacgatcccgtgggtacctactttctcctgatcttccagtaacgttgctaactgattatcgaaaaagagtcggttattgaggccggttttcacgtcctgggcggcataagagcggatcagcgtatcaagacggctgtgttgttcgcgtgcgttctgaatttcacgaagcagcgtatccagcgcactgctggttctgggcggccattcatagatggttcccaacacattagagccacgctcaccgtttaagatacgagtagcccgggtttccagcaattcttgcccggcaagttgccgttgtaaccagcgtaccgccaggaagagcataacaatgataaagccaatcgcccccgtgagcggcgcggtggtcatcaagctatggaaatagttgcccatcggatcctgataaaccagacgcaagctcatccccggatgctttatcaacggaacgctcagttcgcgaaacagatcgctggagccaactggacgataactaccatttctggccagggtataaacctgtttatcaccatggagcaggtctacacgaacgatatctgcgctcatcattaattcggtaatttgtggccttaatacgctgaagtcattgctcacaaggtgggtatcaatcgccgtcgccaccgcctgaacgcgatgactaaacttatactgaatggcgttgtagaaacttaggctacagcccagcaaagtcacaaaaattgttaacccggtgagcagcgtaacaaaggcgctaaatttcgtcgttaatctcatccttgtgttaactccgatagtgaggaagcgggcatactagcaaatcagatttatctcgcaatttattgcgcttcatcggctttgcttttccattagcgagtatagtcttcagaaattattttccaatccatcatgcacatgaggaccacttatgcaggcgttacttttagaacagcaggacggcaaaactctcgcaagtgtacagactctggacgaaagtcgcctgccggagggcgatgtcacggtcgatgttcactggagcagcctgaactataaagatgcgctggcgattaccggtaagggaaaaatcatccgtaattttccgatgattcctgggatcgattttgccggaactgtacgcaccagcgaagatccgcgttttcatgccggtcaggaggtgttactcactggctggggcgttggtgaaaaccactggggtgggctggcggagcaggcgcgagtgaaaggtgactggctggttgccatgccgcaagggctggacgcgcgtaaagcaatgattatcggtactgccggttttaccgccatgctgtgtgtgatggcgctggaagatgccggtgttcgcccgcaggacggggagattgtcgtgacgggtgccagtggtggcgtcggcagtaccgccgtggcgctgctgcataagttgggttatcaggtcgttgccgtttccggtcgcgaaagtacccatgaatatctgaaaagtttaggtgctagccgtgttctccctcgtgatgagtttgccgaatcccgtcctctggaaaaacaagtctgggctggggcaattgacaccgttggcgacaaagtgctggcaaaagtgctggcgcaaatgaattacggcggctgcgtggcggcctgtggtctggcgggtggttttactctgccaaccacggtcatgccatttattctgcgtaatgtccgtttgcaaggggtggatagtgtaatgacgccaccagaacgccgcgcacaagcctggcagcgactggtcgccgatttaccggaaagtttctatacccaggcggcaaaagagatatctctgagtgaggcaccgaactttgccgaggccatcattaataaccagatccagggtcgcacgctggtgaaggttaactaaccatttagcagggaataataagagagggaactcattttgaaatcattattcaatcggttaacgggaaaagcggttagccggacagctttcgtcgaacaccttggtcaggaagttatacaacatcatccaaactggaaagtcatgatttcgactgaccacaaattgatgcgcattgatactccactaaacagctattattgatacgcctccgtcgcctgttaggtttatgttgctttgcctgggcgacgctacgcttagccccttacttatttctggtaccatggggtgaataatctgattttgtttgactacaaattaatcactcgaacctatttaatgctgagcattgtcaatcggttaattttgcgtgctttagcattcacatctatccagacgatgcagtgaaaattgggtaatccccagcaaccgctgcgtaatgtcgtctatcttgtcgcgatcctggcatccctacattatttgtggtctgtgaagattatctcattgcagcccctcatcttcgcagggctggcttttcagcttttcaccttacgttataagaagttccgtcgatgatggcgctaatttcgtgaattgtgcggcttgttgcaaattacacggtgttgaaggttatttacatgttagctgttgattatcttccctgataagaccagtatttagctgccaattgctacgaaatcgttataatgtgcgacctcgtcctccctgacgcagtttttgcgctgcggaaaaggtgacattggcgcaacgaaggtatattttgttttttgccggaggatagcagcagatcgctgcacaatgtccgtcaagtctaacattgacactctggggcaaaatagaccggcgtcccggcctgctggaatttatcgctatgcatacagctgtcggggcatacgctttacagacggcggtgaaacgcctgtcacaatcacactaaacaaagagtacggaacccactcatggatattcgtaagattaaaaaactgatcgagctggttgaagaaagtggcatctccgaactggaaatttctgaaggcgaagagagtgtacgcattagccgtgcagctcctgccgcaagtttccctgtgatgcaacaagcttacgctgcaccaatgatgcagcagccagctcaatctaacgcagccgctccggcgaccgttccttccatggaagcgccagcagcagcggaaatcagtggtcacatcgtacgttccccgatggttggtactttctaccgcaccccaagcccggacgcaaaagcgttcatcgaagtgggtcagaaagtcaacgtgggcgataccctgtgcatcgttgaagccatgaaaatgatgaaccagatcgaagcggacaaatccggtaccgtgaaagcaattctggtcgaaagtggacaaccggtagaatttgacgagccgctggtcgtcatcgagtaacgaggcgaacatgctggataaaattgttattgccaaccgcggcgagattgcattgcgtattcttcgtgcctgtaaagaactgggcatcaagactgtcgctgtgcactccagcgcggatcgcgatctaaaacacgtattactggcagatgaaacggtctgtattggccctgctccgagtgtaaaaagttatctgaacatcccggcaatcatcagcgccgctgaaatcaccggcgcagtagcaatccatccgggttacggcttcctctccgagaacgccaactttgccgagcaggttgaacgctccggctttatcttcattggcccgaaagcagaaaccattcgcctgatgggcgacaaagtatccgcaatcgcggcgatgaaaaaagcgggcgtcccttgcgtaccgggttctgacggcccgctgggcgacgatatggataaaaaccgtgccattgctaaacgcattggttatccggtgattatcaaagcctccggcggcggcggcggtcgcggtatgcgcgtagtgcgcggcgacgctgaactggcacaatccatctccatgacccgtgcggaagcgaaagctgctttcagcaacgatatggtttacatggagaaatacctggaaaatcctcgccacgtcgagattcaggtactggctgacggtcagggcaacgctatctatctggcggaacgtgactgctccatgcaacgccgccaccagaaagtggtcgaagaagcgccagcaccgggcattaccccggaactgcgtcgctacatcggcgaacgttgcgctaaagcgtgtgttgatatcggctatcgcggtgcaggtactttcgagttcctgttcgaaaacggcgagttctatttcatcgaaatgaacacccgtattcaggtagaacacccggttacagaaatgatcaccggcgttgacctgatcaaagaacagctgcgtatcgctgccggtcaaccgctgagcatcaagcaagaagaagttcacgttcgcggccatgcggtggaatgtcgtatcaacgccgaagatccgaacaccttcctgccaagtccgggcaaaatcacccgtttccacgcacctggcggttttggcgtacgttgggagtctcatatctacgcgggctacaccgtaccgccgtactatgacagtatgatcggtaagctgatttgctacggtgaaaaccgtgacgtggcgattgcccgcatgaagaatgcgctgcaggagctgatcatcgacggtatcaaaaccaacgttgatctgcagatccgcatcatgaatgacgagaacttccagcatggtggcactaacatccactatctggagaaaaaactcggtcttcaggaaaaataagactgctaaagcgtcaaaaggccggattttccggccttttttattactggggatcgacaacccccataaggtacaatccccgctttcttcacccatcagggacaaaaaatggacactcgttttgttcaggcccataaagaggcgcgctgggcgctggggctgacccttttgtatctggcagtttggttagtagccgcttacttatctggcgttgcccccggttttaccggctttccgcgctggtttgagatggcctgcatcctgacgccgctgctgtttattggactgtgctgggcgatggtgaaatttatctatcgcgatatcccactggaggatgacgatgcagcttgaagtaattctaccgctggtcgcctatctggtggtggtgttcggtatcagcgtttatgcgatgcgtaaacggagcaccggcaccttccttaatgagtatttcctcggcagccgctctatgggcggtattgtgctggcgatgacgctcaccgcgacctatatcagtgccagtagctttatcggcgggccaggagctgcttataaatacgggctgggctgggtattgctggcgatgattcagcttcctgcagtctggcttagtctcggtattctcggcaagaagtttgcgattcttgcgcgccgctacaatgcagtgacgctgaacgatatgctgtttgcccgctaccagagtcgtcttctggtgtggctggcgagtttgagtttgctggttgcgttcgttggtgcgatgaccgtgcagtttatcggcggtgcgcgcctgctggaaaccgcggcgggtattccttatgaaaccgggctgctgatttttggtatcagcattgcgttatataccgcctttggtggctttcgcgccagcgtgctgaacgacaccatgcaagggcttgtgatgctgattggcaccgttgtgctgcttattggcgtagtacatgccgctggcggcttaagtaacgcagtacagaccttgcaaaccatcgatccgcaactggttacgccacaaggcgctgacgatattctgagccctgcctttatgacgagcttctgggtactggtgtgttttggcgtgattggcctgccgcatactgcggtgcgctgtatctcttataaagacagcaaagccgtacatcgggggatcatcatcggtacgattgtggtcgcaattctgatgttcggtatgcacctggccggagcgttaggtcgggcggtgatccccgatctcaccgtaccggacctggtgatcccaacgttaatggtaaaagtgctgccaccgtttgctgccgggatcttcctggctgcaccgatggctgcgatcatgagcacaattaacgcccaactgctgcaaagttccgctacgatcattaaagatctctatctgaatatccgtccggatcaaatgcaaaacgagacgcgtctgaagcggatgagcgcggtaattacgttagttctcggcgcgttgctgctgcttgccgcctggaagccgccagaaatgatcatctggctgaatttgttggccttcggtgggctggaagccgttttcctgtggccgctggtgctgggtctttactgggaacgcgccaacgccaaaggcgcgctaagtgcgatgatcgttggcggcgtgctgtatgccgtactcgcgacgctgaatattcagtacctgggcttccaccctatcgtgcccagcttactactaagtttgctggctttcctggtcggaaaccgtttcggtacatccgtcccgcaagctaccgttttgactactgataaataaagagttttgccatgccttggatccaactgaaactgaacaccaccggcgcgaacgcggaagatcttagcgatgcgctgatggaagcgggtgccgtttctatcacttttcaggatacccacgatacgccagtatttgaaccgctgccgggcgaaacgcgcctgtggggcgacaccgatgtgattggtctgttcgacgctgaaaccgatatgaacgacgtggtggcgattctggaaaaccatccgctgctcggcgcaggcttcgcgcataaaatcgaacaactagaagataaagactgggagcgcgaatggatggataatttccacccgatgcgctttggtgaacgactgtggatctgccctagctggcgtgatgtgccggacgaaaacgccgtcaacgtgatgttagatccagggctggcgtttggtacgggtacccatccaaccacctctctgtgcctgcaatggctcgacagcctcgatttaaccggtaaaacagtcatcgactttggctgtggttccggcattctggcgatcgcggcgctgaaactgggtgcagcaaaagccattggtattgatatcgatccgcaggcgattcaggccagccgcgataacgccgaacgtaatggcgtttctgaccgtctggaactctacttaccgaaagatcagccagaagaaatgaaagccgacgtggtggtcgctaacatccttgcaggcccattacgtgaactggcaccgttaatcagcgtcctgccggttagtggcggtttgctgggcctttccggtattctggcaagccaggcagagagcgtttgtgaagcttatgccgatagcttcgcactggacccggtcgtggaaaaagaagagtggtgccgtattaccggtcgtaagaattaaccttcgcatcgccgtagggtgacgcggggcgaagtgcgagcaagctcacaaaaggcacgtaaatttgccgattatttacgcaaatttgcgtgccaaaattttcattcataaagaaaaattgagaacttactcaaatttctttgagtgtaaattttagtcactattttctaatatgatgatttttatgagtaattatcgcaccacgctcattttaaatgcaattctttgatccatctcagaggattggtcaaagtttggcctttcatctcgtgcaaaaaatgcgtaatatacgccgccttgcagtcacagtatggtcatttcttaactcatgcgcatcggacaatatcagctcagaaatcgcctgatcgcagcgcccatggctggcattacagacagaccttttcggacgttgtgctacgagatgggagccggattgacagtatccgagatgatgtcttctaacccacaggtttgggaaagcgacaaatctcgtttacggatggtgcacattgatgaacccggtattcgcaccgtgcaaattgctggtagcgatccgaaagaaatggcagatgcagcacgtattaacgtggaaagcggtgcccagattattgatatcaatatgggttgcccggctaaaaaagtgaatcgcaagctcgcaggtagtgccctcttgcagtacccggatgtcgttaaaagcatccttaccgaggtcgtcaatgcagtggacgttcctgttaccctgaagattcgcaccggctgggcaccggaacaccgtaactgcgaagagattgcccaactggctgaagactgtggcattcaggctctgaccattcatggccgtacacgcgcctgtttgttcaatggagaagctgagtacgacagtattcgggcagttaagcagaaagtttccattccggttatcgcgaatggcgacattactgacccgcttaaagccagagctgtgctcgactatacaggggcggatgccctgatgataggccgcgcagctcagggaagaccctggatctttcgggaaatccagcattatctggacactggggagttgctgcccccgctgcctttggcagaggttaagcgcttgctttgcgcgcacgttcgggaactgcatgacttttatggtccggcaaaagggtaccgaattgcacgtaaacacgtttcctggtatctccaggaacacgctccaaatgaccagtttcggcgcacattcaacgccattgaggatgccagcgaacagctggaggcgttggaggcatacttcgaaaattttgcgtaaacagaaataaagagctgacagaactatgttcgaacaacgcgtaaattctgacgtactgaccgtttctaccgttaactctcaggatcaggtaacccaaaaacccctgcgtgacagcgttaaacaggcactgaagaactattttgctcaactgaatggtcaggatgtgaatgacctctatgagctggtactggctgaagtagaacagcccctgttggacatggtgatgcaatacacccgtggtaaccagacccgtgctgcgctgatgatgggcatcaaccgtggtacgctgcgtaaaaaattgaaaaaatacggcatgaactaattcaggttagctaaatgcttgattaaaaaggcgctactcggcatggggaagcgccttttttataggtgtcacaaagggagtgaccatgagaacaggatgtgaaccgacccggtttggtaatgaagctaagaccattattcacggtgatgcgcttgccgaacttaaaaagatccccgccgaaagtgtcgatctgatctttgccgacccaccatataacatcggtaaaaattttgatggtctgatcgaagcctggaaagaagatctgtttatcgactggctgtttgaagtgattgcagagtgccaccgcgttctgaaaaagcagggcagcatgtacatcatgaacagtacggaaaacatgccctttatcgatctccagtgccgcaagctttttaccatcaaaagtcgcatcgtctggagttatgacagttctggagtgcaggcgaaaaaacactacggctccatgtacgaacccatcctgatgatggtgaaagacgcaaagaactacacattcaacggtgatgctattctggtagaagccaaaaccggaagccagcgcgcgttgatcgattatcgcaaaaatcctccacagccttacaatcatcaaaaagtaccgggtaacgtttgggattttccgcgcgtgcgttatttgatggatgaatatgaaaaccacccgacgcaaaaaccggaagccttactgaaacgcattattctcgcctcttccaacccaggcgatatcgttctcgacccgtttgctggtagctttactaccggtgccgtagccatcgccagcggacgaaaattcattggtattgagatcaacagcgagtacatcaaaatggggcttcgacggctggatgtcgcgagccattactctgcggaagaactggcgaaagtgaaaaaaagaaagaccggcaacctgagtaaacgaagccggttaagcgaagttgaccccgatctcattacaaagtaaaggatgtgtaagcctggttttcagattattcatttcgtgtatatttcctgccagacttggttaaacatgcacaggctcaggtaatgattcgcaagtattggtggctcgtcgttttcgctgtcttcgtttttctgtttgatactttactgatgcagtggattgaactgctggcaacagaaacagacaaatgccgcaatatgaacagtgttaatccactaaaactggttaactgtgacgaactgaattttcaggacagaatgtgaatttacatgacacttaattcattcgtttgatgaattaatttcgttatgttttcatctggcatgaacattcttaatacgttatcgaccagagcgggggcttgtttataaagatcataacccgccatattcattaaccagttttgaacaattccgctgaaggcaccatcaataataatcatcacaacatctaaatcgaggttatttgctacacaaccttgttgctgacacgcctgcaatacttcgcggagagtctgcggattaaagcccatcttttcgcgtatcactccctcggccagcatctcatcattaaattcacatttgtgatataagattttcagcaacgcctgctggcggggaattttggcaatatattgcaagccgacaatcaatttttcacgcaattgttgaaacgggtcatgctctaatccagccgtcaagtgttcctggattaactcccgcaaactaggctgttgcaaccacatctcattaaacagttgagtcttgttttcgaagtgccagtagatagcgccacgcgtaacgttagcggcgtcggcaatgtcgttgagcgtcgtcttgcttacgccatgctgcgcaaactgggcgatggcagtttcaatcagttcttgccgggtcttcagagcttcggctttggttctttttgccatgattaattattcaggaaataaatatattcgacacagagtgagaaaatagcgaaggttaatctatcacctaatgtgtatttatacgagaggctaatattgagttgctataaatcgttaaataaataatatatattatttacctaagatacattcactacatcaatatatatttcaatttacgaggttttaattctgcctctttcaacccgcgtcaaaataaaacagtagaatattaatctttttttgtgtttatgtgccttgagatgcctgtattcataactattccttacatcgacgaatgataatttgtaggatagcgaactgtatttttctttctgcgagttaacgcgttgcctttttgggtaaataacgcgcttttggttttttgaggaatagtaatgacgaaacatgccaggtttttcctcctgccctcctttattctgatctccgcggctttaatcgccggttgtaacgataagggagaagagaaagctcacgtcggtgaaccgcaggttaccgttcatattgtaaaaacggccccgttagaagttaagactgaattaccaggccgcaccaatgcttatcgtatagccgaagttcgcccacaggttagcgggatcgtactgaatcgcaatttcactgaaggcagcgatgtgcaagcaggccagtccctgtaccagatcgatcccgcgacctatcaggcaaattatgacagcgcgaaaggcgaactggcgaaaagtgaagccgccgccgccatcgcgcatttgacggtaaaacgttacgttccgctcgtgggtacgaaatacatcagccagcaggagtacgaccaggccattgctgatgctcgtcaggccgatgccgccgtgattgccgcaaaagccacagtcgaaagcgctcgcatcaatcttgcttataccaaagtcactgcgccaattagcggacgtatcggcaaaagcactgtgaccgaaggcgctcttgtcactaatgggcaaacgactgaactggcgactgtccagcagctcgatcctatctacgttgatgtgacccaatccagcaacgattttatgaggctgaagcaatccgtagagcaaggaaatttgcataaggaaaacgccaccagcaacgtagagttggtcatggaaaacggtcaaacctatcccctgaaaggtacgctgcaattctccgatgtgaccgttgatgaaagcaccggctccataaccctacgtgctgtcttccctaacccgcaacatacgcttttgccgggtatgtttgtgcgtgcacggattgatgaaggcgtccaacctgacgccattcttatcccgcaacaaggcgttagccgcacaccgcgtggtgatgcaaccgtgctgattgttaacgataaaagtcaggttgaagcgcgccctgtcgttgccagtcaggcgattggcgataaatggttgattagtgaaggactgaaatctggcgatcaagtcattgtcagcggcctgcaaaaagcgcgtccgggagagcaggttaaagccactaccgatacccccgcagatactgcaagcaagtaaggtaatctgacatggcaaacttttttattcgacgaccgatatttgcatgggtgctggccattattctgatgatggcgggcgcactggcgatcctacaattgcccgtcgctcagtatccaacaattgcaccgcctgcggtttctgttagtgcaaactatccgggcgctgatgcgcagaccgtgcaggatacggtgacgcaggttatcgaacagaatatgaacggtatcgataacctgatgtatatgtcctccaccagcgattccgccggtagcgtgacaattacccttaccttccagtccgggaccgatcctgatatcgcgcaagtgcaggtgcagaacaaactccagctcgccacgccgttgctgccgcaggaggttcagcagcaggggatcagtgttgaaaagtccagtagcagctatttgatggtggcgggctttgtctctgataacccaggcaccacacaggacgatatcagcgactatgtggcctctaacgttaaagatacgcttagccgtctgaatggcgtcggtgacgtacagcttttcggcgcacagtatgcgatgcgtatctggctggatgccgatctgctaaacaaatataaactgacaccggttgatgtgattaaccagttgaaggtacagaacgatcagatcgctgccggacagttgggcggaacgccagcgttaccagggcaacaattgaacgccagcattattgctcagacgcggtttaaaaatccggaagaattcggcaaagtgaccctgcgcgtaaacagtgacggcagcgtggtacgcctgaaagatgtcgcacgggttgaacttggcggtgaaaactataacgttatcgctcgtatcaacggaaaaccggcggcgggcctggggattaagctggcaaccggcgcgaatgctctcgataccgcgaaagccattaaggcaaaactggcggaattacagccattcttcccgcagggaatgaaggttctctacccttatgacaccacgccattcgtccagctttctattcacgaagtggtaaaaacgctgttcgaagccattatgctggtgttcctggtgatgtatctgttcttgcagaatatgcgagcaacgctgatccccgccattgcggtacccgtggtgttgttagggacgtttgccatcctcgccgcttttggttactccatcaacacactaacgatgttcgggatggtgcttgccatcgggctgctcgtcgatgatgcgatagtggtggtggagaacgtcgagcgcgtgatgatggaggataagctcccgccaaaagaagcgacggaaaaaagcatgagccaaattcagggcgcactggtgggtatcgcgatggtgctgagtgcggtatttattccgatggcattcttcggcggttctactggggcaatttatcgccagttctctatcaccatcgttagcgcaatggcgctttctgttctggtggcattgattcttacccctgcgttatgtgcaacgctgcttaaacccgtctctgctgagcatcacgaaaataagggcggtttcttcggttggtttaataccaccttcgatcatagcgttaaccactacaccaacagcgtcggcaaaatcctcggatccacaggacgatatttactgatctatgcgctgattgttgcaggaatggtggtgttgtttttacgtcttccgtcttccttcttacctgaagaggatcagggtgtctttctgaccatgattcagttacccgctggcgcgacgcaagagcggacgcaaaaagtgttggatcaagttacggattactatctgaagaacgagaaagcgaacgttgaaagtgtctttacggttaacggctttagcttcagcggccaggcacaaaacgccggtatggccttcgtcagtctgaaaccgtgggaagagcgtaatggtgacgaaaacagtgcggaagcggtaatccatcgtgccaaaatggaattgggcaagatccgcgacggttttgtcattccattcaatatgccagccattgttgaactgggcacggcaacgggtttcgactttgagttaattgatcaggctgggctgggtcacgatgccctaacccaggcccgtaaccagttgcttggtatggcggcgcaacatcctgccagcttagtcagcgtgcgccctaatggcctggaagacaccgcgcagtttaaactggaagttgaccaggaaaaggcgcaggcattaggtgttagtctttctgacatcaatcagaccattagtacggcgctgggtgggacttacgttaacgacttcatcgaccgtggccgcgtgaaaaagttgtatgttcaggcggatgccaaattccgtatgctgccagaagatgtcgataaactttatgtccgcagcgccaacggcgaaatggtgccattcagcgcctttaccactagtcattgggtgtatggctctccgcgactggaacgctacaacggtctgccgagtatggagattcagggggaagccgcgccaggaaccagttccggcgatgccatggcgttgatggaaaaccttgcgagtaaattacctgcgggcattggttatgactggacgggtatgagctatcaggaacgcttaagcggaaaccaggctcccgctctggtagcaatttcctttgtggttgttttcctgtgccttgctgcactctatgaaagctggagtattcctgtcagcgttatgttggtagtgccgttagggattgtcggcgtgctgctggcggcgacactctttaatcaaaaaaatgacgtctactttatggtgggcttgctaacgacaattggcttgagcgccaaaaacgctattttgatcgttgagttcgctaaagatctcatggagaaagagggtaaaggtgttgttgaagcgacactgatggcagtacgtatgcgtctgcgtcctatcctgatgacctctctcgcctttattctcggcgtattaccgctagctatcagtaacggtgccggcagtggcgcgcagaacgctgtgggtatcggggtaatgggaggaatggtctctgcaacgttgctggcaatcttcttcgtaccggtgttctttgtggtgatccgccgttgctttaaaggataaatcagaaacataaaggcgctttcgggtgcctttattatttccagtgaaacccataaaaattaataagatattcttctgctcactctttaaaagctttctatagttcccgctcccttcactatttttacaattcacataatttgtcattattcattccgcaagatttataacctccggtgataaaatggcattcagctcgttaataagagagttaacttattaagcgttagcgtttattactgaggtaacaccatgaaaagattaattcctgtggcattgctcaccgcattgctggcgggctgtgctcacgatagcccctgcgttccggtttatgacgatcagggtcgtctggttcacaccaatacctgtatgaaaggcacgactcaggataactgggaaacggctggggctattgccggcggggcagctgctgttgctggcctgacgatggggatcatcgctctaagcaaataactgaacagggcgcggagttccgcgctctttttaacgatacagtatctctccataagataaaatattgctatattctgctgggtaattccctgctgatttagcatgttacatcgcgttatttcgctgctttcgaaataacgcatcaatttaattttcacacttcccaccagaaatatactcacgctaacaatcattattctgcttagtaaaacacgcgtaaatattttgcgccaaaatgtggcgcatgtttcattttcgcaccattgcggggcgctgtttttattatttcctgtctacactcagcttattgcgacgcgaaatcgtgcgcaaaagctggcactacttttgcttataagaggatggccacagacaggtaaaagacgtttcccaaacgtcctataacgataattttcgcctcacaggaagcattatgaaaaagatgatgatagccacactggctgccgccagcgtgctgcttgccgttgcaaatcaggcgctgctggcgcgacgcttgatgccgttcagaaaaaaggttttgtgcaatgcgggatcagtgatggattacctgggttctcttatgccgatgctgacggtaagtttagtggtattgatgttgatatttgtcgtggtgttgccgctgctgtatttggtgacgacacgaaagtgaaatataccccgctcactgcaaaagaacgcttcaccgctttacagagtggggaggtggatttgctctcccgtaatacgacctggactagttctcgcgatgccgggatgggaatggcatttaccggcgtcacttattacgacggcattggcttcctgacgcacgataaagcggggctaaaaagcgcgaaagaactggatggcgctaccgtctgtattcaggcgggtactgataccgaactcaacgtcgccgactacttcaaggcaaacaatatgaagtacacaccggtgactttcgatcgctctgacgaaagtgcgaaggcactggaatctggtcgctgcgatacgctggccagcgatcaaagtcaactgtatgccctgcgcatcaaattaagcaacccagctgaatggattgtcttaccggaagttatcagtaaagaaccgcttggtccggtagttcgtcgtggcgatgatgaatggttcagcattgtacgctggacgcttttcgccatgctgaatgctgaagagatgggcatcaattcccagaacgtcgatgaaaaagcggctaatccagcaacgcctgatatggcacatctgctgggtaaagaaggcgattacggcaaggatctgaagctggataataaatgggcctataacatcatcaaacaggtgggtaactacagcgaaatttttgagcgtaacgtaggtagtgaaagcccgctgaaaattaaacgtgggcaaaataatctctggaataacggcggtattcagtacgcaccgcccgtgcgttaagtcggtgtgaggtaacgagcgtcgctacggcggcgctctcttcagcgttatgctttccgaggtttctatgtctcatcgccgcagtaccgttaaaggcagtctctcttttgccaaccctacggttcgcgcctggttattccagatccttgccgttgttgctgttgtcggcattgttggttggttatttcacaacactgtaacgaatctcaataatcgtggcattactagtggttttgcctttctggatcgcggcgctggcttcggtattgtccagcatttgatcgattaccagcagggcgacacctacggacgcgtttttattgtcggcttactcaatacgctactggtttctgcattgtgtattgtgttcgcttctgttttgggcttctttatcggtctggcgagacttagcgataactggctgctacgaaagctttccacaatttatattgagatcttccgtaatattcccccgctgctgcaaatcttcttctggtactttgccgtgttgcgcaatttgcccggaccacgccaggctgtgagcgcgtttgatctggcctttttgagcaatcgtgggctttatattccgagtccgcagctgggagacggatttattgcgtttatcctggctgttgttatggctatagtcctttctgttgggctattccgctttaataaaacataccagataaagaccggacaactgcgccgcacctggccgatcgccgcagtgttgatcattggtttgcctttactggcgcaatggctttttggcgcagcactacactgggatgtcccagccctacgaggctttaacttccgcggcgggatggttttaattcctgaactggcagccttaacgctggcacttagcgtttatacatctgcatttatcgccgagattatccgcgctgggatccaggcagtgccttatggtcaacatgaagcggctcggagtctgggattacccaacccggttacgctacgccaggtcattattccccaggcattgcgggtgattattccaccgttaaccagccagtatctcaacatcgtcaaaaactcctctcttgccgccgctattggctatcccgatatggttagcctgtttgccggcaccgtgctgaatcagacggggcaagccatcgagacgatagccatgaccatgagcgtctatctgattatcagcctgactatcagcctgctgatgaatatctataaccgccgcatcgcgatcgttgaacgctaaggagtcatgatgacaaaagtattgctgtctcatcccccgcgcccggcgagccataacagtagccgcgcgatggtgtgggtgcgaaaaaatctgttctccagctggagcaatagcctgctgactattggctgcatatggttgatgtgggaactgatcccaccgttgctgaactgggcatttttgcaggctaactgggttggcagtacgcgtgccgactgcacaaaagccggtgcctgttgggtcttcatccacgaacgatttggtcagtttatgtatgggctttacccacacgaccaacgctggcgaattaacctcgcattactgattgggcttgtgagcatcgcaccaatgttctggaaaatactcccgcatcgcggtcgctatattgcggcctgggcggtgatttacccactgattgtctggtggctgatgtatggcggtttttttgctcttgagcgggttgaaacccggcaatggggcgggctgacgctaactttaattattgcaagtgttgggattgcgggggcgctaccgtgggggatcttactggcgttaggtcgccgctcccatatgccgattgtgcgtatcttaagcgtcatttttatcgaattctggcgcggcgtgccgctgattaccgttctgtttatgtctagcgtcatgctgccgttgtttatggcagaaggcaccagtatcgacaaattgatccgcgcgctggttggcgtgatcctgtttcagagtgcatatgttgcggaagtcgtgcgaggtggattacaggcgctgcctaaagggcaatatgaagcggcagagagcctggcgttgggttactggaaaactcaggggctggttattctgccacaggcgttgaagctggtaattcctgggctggtaaataccatcatcgcactcttcaaagataccagcctggtgatcattatcgggttgttcgatcttttcagtagcgttcagcaggcaaccgttgatcccgcctggttgggtatgagcacggaagggtatgttttcgccgcgctgatctactggatcttctgtttcagcatgagccgctatagccagtatctggaaaaacgttttaacaccgggcgtacaccgcattgaggacactatgagccaaattttactgcaacctgctaacgcgatgattacgctggaaaacgtcaataaatggtatggacaattccatgttttgaaaaatataaatttaaccgtgcaaccgggagaacggatcgttctgtgtggccctagtggttccggtaaaagcacaaccattcgttgtattaatcatctggaagaacatcaacagggacggatcgtggtagatggcatcgaacttaatgaagatatccgcaatattgagcgcgtcaggcaggaagtgggaatggtctttcagcatttcaatctcttccctcatctgaccgttttacagaactgtaccctggcaccgatttgggtacgcaagatgcctaagaaagaggctgaagatctggcggtgcattacctagagcgggtgagaattgccgaacatgcgcataagtttcccggacagattagtggtggtcagcagcaacgcgttgccattgcgcgtagcctgtgtatgaagccgaaaattatgttgtttgatgagccaacgagcgcgctcgatcctgagatggtgaaagaggtgctggatacgatgattgggctggcgcagagcggtatgacaatgttgtgtgtaacacatgagatggggtttgcacgaaccgtcgctgaccgggtaatttttatggatcgtggggaaatagtggagcaagctgcacctgatgaattttttgcgcatcctaaaagtgagcgtacgagggcatttttaagccaggtaatccattaattgaatgttagttcgaaaagcaaaaaggccatcctttcggatggcctttcgcttgatttgatgtctggcagtttatggcgggcgtcctgcccgccaccctccgggccgttgcttcgcaacgttcaaatccgctcccggcggatttgtcctactcgggagagtgttcaccgacaaacaacagataaaacaaaaggcccagtcttccgactgagccttttgttttatttgatgtctggcagttccctactctcgcatggggagaccccacactaccatcggcgctacggcgtttcacttctgagttcggcatggggtcaggtgggaccaccgcgctactgccgccagacaaattcttttctaatctgccgaactttaacctaaaaagtggtgctgatacccagagtcgaactggggacctcacccttaccaagggtgcgctctaccaactgagccatatcagcacgctaaatttgatgcctggcagttccctactctcgcatggggagaccccacactaccatcggcgctacggcgtttcacttctgagttcggcatggggtcaggtgggaccaccgcgctacggccgccaggcaaattctgttttatcagaccgcttctgcgttctgatttaatctgtatcaggctgaaaatcttctctcatccgccaaaacagcttcggcgttgtaaggttaagcctcacggttcattagtaccggttagctcaacgcatcgctgcgcttacacacccggcctatcaacgtcgtcgtcttcaacgttccttcaggacccttaaagggtcagggagaactcatctcggggcaagtttcgtgcttagatgctttcagcacttatctcttccgcatttagctaccgggcagtgccattggcatgacaacccgaacaccagtgatgcgtccactccggtcctctcgtactaggagcagcccccctcagttctccagcgcccacggcagatagggaccgaactgtctcacgacgttctaaacccagctcgcgtaccactttaaatggcgaacagccatacccttgggacctacttcagccccaggatgtgatgagccgacatcgaggtgccaaacaccgccgtcgatatgaactcttgggcggtatcagcctgttatccccggagtaccttttatccgttgagcgatggcccttccattcagaaccaccggatcactatgacctgctttcgcacctgctcgcgccgtcacgctcgcagtcaagctggcttatgccattgcactaacctcctgatgtccgaccaggattagccaaccttcgtgctcctccgttactctttaggaggagaccgccccagtcaaactacccaccagacactgtccgcaacccggattacgggtcaacgttagaacatcaaacattaaagggtggtatttcaaggtcggctccatgcagactggcgtccacacttcaaagcctcccacctatcctacacatcaaggctcaatgttcagtgtcaagctatagtaaaggttcacggggtctttccgtcttgccgcgggtacactgcatcttcacagcgagttcaatttcactgagtctcgggtggagacagcctggccatcattacgccattcgtgcaggtcggaacttacccgacaaggaatttcgctaccttaggaccgttatagttacggccgccgtttaccggggcttcgatcaagagcttcgcttgcgctaaccccatcaattaaccttccggcaccgggcaggcgtcacaccgtatacgtccactttcgtgtttgcacagtgctgtgtttttaataaacagttgcagccagctggtatcttcgactgatttcagctccacgagcaagtcgcttcacctacatatcagcgtgccttctcccgaagttacggcaccattttgcctagttccttcacccgagttctctcaagcgccttggtattctctacctgaccacctgtgtcggtttggggtacgatttgatgttacctgatgcttagaggcttttcctggaagcagggcatttgttgcttcagcaccgtagtgcctcgtcatcacgcctcagccttgattttccggatttgcctggaaaaccagcctacacgcttaaaccgggacaaccgtcgcccggccaacatagccttctccgtccccccttcgcagtaacaccaagtacaggaatattaacctgtttcccatcgactacgcctttcggcctcgccttaggggtcgactcaccctgccccgattaacgttggacaggaacccttggtcttccggcgagcgggcttttcacccgctttatcgttacttatgtcagcattcgcacttctgatacctccagcatgcctcacagcacaccttcgcaggcttacagaacgctcccctacccaacaacgcataagcgtcgctgccgcagcttcggtgcatggtttagccccgttacatcttccgcgcaggccgactcgaccagtgagctattacgctttctttaaatgatggctgcttctaagccaacatcctggctgtctgggccttcccacatcgtttcccacttaaccatgactttgggaccttagctggcggtctgggttgtttccctcttcacgacggacgttagcacccgccgtgtgtctcccgtgataacattctccggtattcgcagtttgcatcgggttggtaagtcgggatgacccccttgccgaaacagtgctctacccccggagatgaattcacgaggcgctacctaaatagctttcggggagaaccagctatctcccggtttgattggcctttcacccccagccacaagtcatccgctaatttttcaacattagtcggttcggtcctccagttagtgttacccaaccttcaacctgcccatggctagatcaccgggtttcgggtctataccctgcaacttaacgcccagttaagactcggtttcccttcggctcccctattcggttaaccttgctacagaatataagtcgctgacccattatacaaaaggtacgcagtcacacgcctaagcgtgctcccactgcttgtacgtacacggtttcaggttctttttcactcccctcgccggggttcttttcgcctttccctcacggtactggttcactatcggtcagtcaggagtatttagccttggaggatggtccccccatattcagacaggataccacgtgtcccgccctactcatcgagctcacagcatgtgcatttttgtgtacggggctgtcaccctgtatcgcgcgcctttccagacgcttccactaacacacacactgattcaggctctgggctgctccccgttcgctcgccgctactgggggaatctcggttgatttcttttcctcggggtacttagatgtttcagttcccccggttcgcctcattaacctatggattcagttaatgatagtgtgtcgaaacacactgggtttccccattcggaaatcgccggttataacggttcatatcaccttaccgacgcttatcgcagattagcacgtccttcatcgcctctgactgccagggcatccaccgtgtacgcttagtcgcttaacctcacaacccgaagatgtttcacttcagagttgcgaaaatttgagagactcacgaacaactttcgttgttcagtgtttcaattttcagcttgatccagatttttaaagagcaaaacttcgcagtgaacctttgcaggtacactctgaagtattttttatttaatcactacagagatggtggagctatgcgggatcgaaccgcagacctcctgcgtgcaaagcaggcgctctcccagctgagctatagccccataacatgtagttaaaacctcttcaaatttgccgtgcaaatttggtaggcctgagtggacttgaaccaccgacctcacccttatcaggggtgcgctctaaccacctgagctacaagcctgtagaggttttactgctcattttcatcagacaatctgtgtgagcactgcaaagtacgcttctttaaggtaaggaggtgatccaaccgcaggttcccctacggttaccttgttacgacttcaccccagtcatgaatcacaaagtggtaagcgccctcccgaaggttaagctacctacttcttttgcaacccactcccatggtgtgacgggcggtgtgtacaaggcccgggaacgtattcaccgtggcattctgatccacgattactagcgattccgacttcatggagtcgagttgcagactccaatccggactacgacgcactttatgaggtccgcttgctctcgcgaggtcgcttctctttgtatgcgccattgtagcacgtgtgtagccctggtcgtaagggccatgatgacttgacgtcatccccaccttcctccagtttatcactggcagtctcctttgagttcccggccggaccgctggcaacaaaggataagggttgcgctcgttgcgggacttaacccaacatttcacaacacgagctgacgacagccatgcagcacctgtctcacggttcccgaaggcacattctcatctctgaaaacttccgtggatgtcaagaccaggtaaggttcttcgcgttgcatcgaattaaaccacatgctccaccgcttgtgcgggcccccgtcaattcatttgagttttaaccttgcggccgtactccccaggcggtcgacttaacgcgttagctccggaagccacgcctcaagggcacaacctccaagtcgacatcgtttacggcgtggactaccagggtatctaatcctgtttgctccccacgctttcgcacctgagcgtcagtcttcgtccagggggccgccttcgccaccggtattcctccagatctctacgcatttcaccgctacacctggaattctacccccctctacgagactcaagcttgccagtatcagatgcagttcccaggttgagcccggggatttcacatctgacttaacaaaccgcctgcgtgcgctttacgcccagtaattccgattaacgcttgcaccctccgtattaccgcggctgctggcacggagttagccggtgcttcttctgcgggtaacgtcaatgagcaaaggtattaactttactcccttcctccccgctgaaagtactttacaacccgaaggccttcttcatacacgcggcatggctgcatcaggcttgcgcccattgtgcaatattccccactgctgcctcccgtaggagtctggaccgtgtctcagttccagtgtggctggtcatcctctcagaccagctagggatcgtcgccttggtgagccgttaccccaccaacaagctaatcccatctgggcacatccgatggcaagaggcccgagggtccccctctttggtcttgcgacgttatgcggtattagctaccgtttccagtagttatccccctccatcaggcagtttcccagacattactcacccgtccgccactcgtcagcgaaacagcaagctgtttcctgttaccgttcgacttgcatgtgttaggcctgccgccagcgttcaatctgagccatgatcaaactcttcaatttaaaagtttgatgctcaaagaattaaacttcgtaatgaattacgtgttcactcttgagacttggtattcatttttcgtcttgcgacgttaagaatccgtatcttcgagtgcccacacagattgtctgataaattgttaaagagcagttgcgacgcggctttcagctcactgtcgcgaggtggcgtatattacgctttcctctttcagagtcaaccctgaatttcaggatttttttctcttcgttgttccgaccatcctgtgaagtgtttcacgttgtcgtctcaacggaggcgcattatagggatcccaattttttgcacaagtatttttttgatctttttttctgtttgttgttttttcaccctttttgctgcaatcgcacacaaaacggtgcttttttgcatactaaaagacttgcacaaggccaataatgcccccaaagtcattagtaaatcatttattgctgaggtaagtatgtctgatgttttacgcccataccgcgatctttttccacaaatcggtcagcgcgtaatgatcgacgatagcagtgtcgtgattggtgacgttcgtctggctgatgatgtggggatctggccgctcgttgtgattcgtggagatgtacattatgtacagatcggagcacgcaccaatatccaggatggcagtatgttgcatgtcactcataaatccagctacaacccagatggcaacccattaaccattggcgaagatgtcactgttggtcacaaggtgatgctccacggctgcaccattggcaatcgagttttggttgggatgggcagtattttacttgatggcgcaatagtagaagatgatgtgatgattggtgcgggtagtctggtcccacaaaataaacggctggagagcggatatctgtatctcggtagccccgtcaaacagatccgcccgttaagtgatgaagagaaggctgggttacgctattccgcgaataattacgtgaaatggaaggacgaatatctggatcagggtaaccagacccagccttgatcatcttcactttgttcctgaattaagttttccgcttcttcttccaggtcccagcgatgctgacgaaaactcgctaaccactgttctggcgtatctccagtaaagcgatacgccagactctcgccagagatcgcgcatgtcagttgcataccattcacgagagcgggaaaacatacacattttttattctcgtcccactcttccctgtccggaaactggatggcctgattcacgcggacaattcctcctgcaattgctttataactggttctacgtcaggcagaacaccgtgccagagaagaaaggcatgagccgcctgtgccaccagcattcctaaaccatcagcattacgcttactgcctcgctgctcacaccatgccagaaaaggagtttttcctttctgatagaacatgtcatagcaataaatgcctggatgaatgaggctactcgggatcgccggaatatcaccactgatgccactggatgttgcattaataatgagatcaaactcatgaccttccagttcgtccatactcaacgcctgaatactgccagtgtgcgcaaacaatttagccaactcttccgcgcgggataccgtccgattagttattgtcaccgcacagtccagggaaaggagtggcagtagtacgccgcgagatgctccaccagcgccgataagcagaatacgtaaaccagggcggataaaagacagacgttccagatcgcttaacaagcctacaccatcggtattgtcacccagcaggcgtccatcttctaaccgcatgagggtattaacagcaccagccaacgctgcccgttcagtaagctcatccgctctggcaaaagcctcttctttaaaaggcaccgtcacattcgcacctttaccaccagcactaaagaaagcgttcagtgtgttgatgaaatcattgatgggtgccaacacgcgcccatagggatgttcaatattcagttgctgagcaaattgctgatgaatgaatgggcttttgctgtgggctatcggattaccaaaaacagcataggtttccattatgttacccctgtcgaaacagttcacccgtcagggcatcgcggatttcactaggatttaaacgcccccccgtttcaccaggcacaaccgggaacgccgcgccaaattgtgcgcgaacttcgtctactgttcgacaaggtggcaatccactcaagttggcactggtagaaaccagcggtttaccataagcctggcacaaagcaaccaccaacggatggtcggtgactcgtacagcaaggctatcaaagcggcccgtcaaccagcgcggtgttgtcgcaggcgcgggaaagacaaaggtgacaggacctggccagcgggaaaaaatggtttcacgctgcacgtcagtcaacatggtgtcatcaatatagggtttaagctgctcgtaatttgctgcgattaaaatcagccccttatcaaccggacgctgttttaactccaacagtcgcatcactgctgtttcgctatcaggatcgcacccaacaccgaaaacggcttccgttggataggcgatgacacgttcttcattgagaacatctatcgcagctgcgatagcgtctctttgcaggttattattcacgttattattccgcgctaaccggctttccacattgtttactggcacaaaagtgttttacaccctgcgcggttttcttttcgatgagtagcggataatgacactcagggcattctccagctatgggtttgaagttaatggcaaattgacactccgggtagcgatcacaagagtgaaatgttttgccataacgggagcggcgctggaccagatggcccgtccgacattgggggcatgtaattgctgtttcgtccggtttatcgataagttcggtatgttcgcattcagggtagttaatgcaaccaataaacataccaaagcgtccctggcgtaataccagatttgcgccacatgcagggcaaacctgcccctccagaactttgacgatatgtccatccgcactagatttcagaggacggacgtagtcacacgccggatactgactgcatccaagaaacggaccgtgtttcccggatcgaataaccagttcagccccgcactttgggcaggactcattattacgcaccgtgaacagtgcacttttcgccataacaacttatgctgaattaaagaaatgattaatgcagcataccttcattcacttcaaagagtaattcttccatttgctggtacgcattttcgcagcccggaatattgaacaacaccatcaggatcacccatttcagatcatccagttcgaactctgcgttatccagcgcgagcactcgctctatcaccatttcacgagtttcaaggttgagcacctgaatctgctcaaggaaaagcagaaacccacggcagctggcatccagtcgttcacactcttccggtgtataaatacgcatggagagaggatcgctggccagttgcatcggttctgccaacccttcctgataatcagcaagtttttccagccatagcagggcattgtagatatcttctcgctcaaaacctgcgtcggtaagatcctgttcaagtttgtcttgatccacacgcaactcagcttctgtgtgaatataggtttcaaacaaatacattagtacgtcgaacatggcatgccctcctcaatcggacatagccgccgggtacagctgcgatccatcctgctaactccagttcgagtagttgagtaactacctctggcacaggttggccggcacgttcagcgacgacgtcaacaggtgttacctcatctcctacgttagccaggagctcaggaaatggcaatgccacgtcttgctgatctggactataaaaactattttcaggggcgtctggcaaccagtgcaatccaaattgcaagttttccagaatttcttccggttccgtcacaagaatcgcaccttgttttattaaccagtgaggcccttcgcttcccggattccctattggacctggcaaggcaaaaacttctcgcccctgctcaagcgcacaacgtgctgtcaccaggctaccactacgcaaagccgcttccaccaccagtacacctttacttagaccactgataatgcgatttcttcgtgggaaattgtaagcaaggggtggaacatcgaggggaaattcgctgacgagagcgcccccctgttcaagcagactggcagccagtcgggcatgacggcggggatgaatggtattaagtccattccccaatacagcaatgctgacgccatttacctgtaaggctgctttatgcgctacaccatcgattccacgcgccagtccactcgtaattgtcactccacgcgtcgccagagtttcgcaaaataatcgtccccatcgctcgccataccaactatgcgcccgactccccactacggcaagctgaaaactatgcagcgcgtgcagttctccttcaacaaacagtgcgccggggtaatctgtcgtcgccagaagttgaggaggataaaattcgctgtccgcaggaattaaatgatggttgggttgctccaaccaacaaagactgctttcgatactctttcgtggaaaactaagaaagcgttgtgcctgccgcaatgtaagccctgtttgctgcaatacaaccgcatcaatatggctctgttttgccacccagtgagcgatacggaccatatcatcgccgtacaagctgctgatactcattaaacgcagccaaatttctgtatcgaccatccttatctccctgccataagcagccttagcaatctttgcgattggtcagtgatgctgtcaatcagagggggatttgtctagaatagaagaaataatctttctaactcctgaacacatctctggagatttatgagtgttttgcaagtgttacatattccggacgagcggcttcgcaaagttgctaaaccggtagaagaagtgaatgcagaaattcagcgtatcgtcgatgatatgttcgagacgatgtacgcagaagaaggtattggcctggcggcaacccaggttgatatccatcaacgtatcattgttattgatgttagcgaaaaccgtgacgaacggctagtgttaatcaatccagagcttttagaaaaaagcggcgaaacaggcattgaagaaggttgcctgagcatccctgaacaacgtgctttagtgccgcgcgcagagaaagttaaaattcgcgcccttgaccgcgacggtaaaccatttgaactggaagcagacggtctgttagccatctgtattcagcatgagatggatcacctggtcggcaaactgtttatggattatctgagtccgctgaaacaacaacgtattcgtcagaaagttgaaaaactggatcgtctgaaagcccgggcttaaggataagaactaacgtgagtgaaagtctacgtattatttttgcgggtacacctgactttgcagcgcgtcatctcgacgcgctgttgtcttctggtcataacgtcgttggcgtgttcacccagccagaccgaccggcaggacgcggtaaaaaactgatgcccagcccggttaaagttctggctgaggaaaaaggtctgcccgtttttcaacctgtttccctgcgtccacaagaaaaccagcaactggtcgccgaactgcaggctgatgttatggtcgtcgtcgcctatggtttaattctgccgaaagcagtgctggagatgccgcgtcttggctgtatcaacgttcatggtagtctgctgccacgctggcgcggtgctgcaccaatccaacgcagtctatgggcgggtgatgcagaaactggtgtgaccattatgcaaatggatgtcggtttagacaccggtgatatgctctataagctctcctgcccgattactgcagaagataccagtggtacgctgtacgacaagctggcagagcttggcccacaagggcttatcaccacgttgaaacaactggcagacggcacggcgaaaccagaagttcaggacgaaactcttgtcacttacgccgagaagttgagtaaagaagaagcgcgtattgactggagtcttagcgcagcacagcttgaacgctgcattcgcgctttcaatccatggccaatgagctggctggaaattgaaggacagccggttaaagtctggaaagcaagcgtcattgatacggcaaccaacgctgcaccaggaacgatccttgaagccaacaaacaaggcattcaggttgcgactggtgatggcatcctgaacctgctcagcttacaacctgcgggtaagaaagcgatgagcgcgcaagacctcctgaactctcgtcgggaatggtttgttccgggcaaccgtctggtctgatagtccactcttctaagcccggtcttgccgggcgtttttatacttatgaaaaaacaacgtaatttacgtagcatggcggcccaggccgttgaacaagtcgtcgagcaagggcaaagtttaagcaacattctgccaccgctccagcaaaaagtttccgataaagacaaagcacttcttcaagagttgtgctttggcgtactgcgtacgcttagccagttagactggctgattaataagttaatggcccgtccgatgaccggcaaacagcggaccgtgcattacctgattatggttggtttgtatcaactgctttatacccgcattccacctcatgctgcgctggctgaaacggttgaaggcgctatcgcaattaagcgtccgcaacttaaagggttgataaacggtgtattacgccagttccagcgtcagcaagaagagttattagccgagtttaatgccagtgatgcacgttatctgcatccttcctggttgctgaagcgtctgcaaaaagcgtatccagagcagtggcaatccatcgtcgaagccaataaccagcgtccgccaatgtggctgcgtattaatcgtacgcatcattcccgcgacagctggcttgcattgctggatgaagcaggaatgaaaggtttcccgcatgcggattaccctgatgctgtacgtctggaaacacctgcacctgttcatgcgctacctggttttgaagacggatgggttaccgttcaggatgcaagtgcacaaggttgcatgacctggcttgcgccacaaaacggtgaacacattttggatctttgtgccgcccccggcggtaaaacaacgcatatccttgaggtggcaccagaagcgcaggttgttgcggttgatatcgacgaacagcgcctctctcgggtttacgacaatttaaaacgccttggtatgaaggcgaccgtgaaacaaggtgatggccgttacccttctcaatggtgtggcgagcaacagtttgatcgcattttattagatgcgccttgtagtgcaaccggtgtgattcgtcgccatccagatattaaatggttacgtcgcgatcgcgatatcccggaactcgcgcaattgcagtctgaaattctcgacgccatttggccgcatttaaaaaccggtggaactctggtctatgccacctgtagcgtgttaccggaagagaatagcctgcagattaaagcctttttgcaacgtaccgctgatgccgaactttgcgaaacaggaacaccagagcaaccgggtaaacaaaatctacctggtgccgaagagggcgacggcttcttttacgctaagctaatcaaaaagtgatgagataacgggtcgcgactgatgaaaattatcattctgggtgccggccaggttggcggcacactggcggaaaacctggttggcgagaacaacgatattactgttgtcgataccaacggtgagcgtctgcggaccttacaggataaatttgacctgcgggtcgtgcaggggcatggctctcatccacgcgtattgcgggaggcaggtgccgacgacgccgatatgctggttgctgtaaccagtagtgatgaaaccaatatggttgcctgccaggtagcctacagtcttttcaacacccctaatcgcatcgctcgtatccgcagtccagactacgtgcgcgatgccgataagctatttcatagtgatgctgtgccgattgatcatctgatcgcaccagagcagttggttatcgataatatttaccgactgattgagtatcccggcgcattgcaggtggtgaacttcgctgagggtaaagtcagcctggctgtggttaaagcctattatggcggcccgctgattggtaatgcacttagcaccatgcgcgaacatatgccacatatcgatactcgtgtggcagcaattttccgccacgatcgccccattcgtccgcaaggtagcaccattgttgaagctggtgatgaagtgttctttattgccgctagtcagcatatccgcgcggtgatgagtgaattacagcgactggaaaaaccgtataagcggatcatgctggttggtggcggtaatatcggtgcagggctggcgcgtcgtctggaaaaagattacagcgttaaactcatcgaacgtaatcagcagcgcgctgccgaactggcggaaaagttacagaatacgatcgtcttttttggtgatgcgagcgatcaagaactactggccgaagaacatatcgatcaagttgatctgtttattgccgtcaccaacgatgacgaggccaatatcatgtccgccatgcttgccaaacgtatgggtgcgaaaaaggtgatggtattgatccagcgtcgcgcttatgtggatctggttcaggggagcgttatcgatattgcgattagtccacaacaagcaactatttctgcgttgcttagccatgtgcgaaaagcagatattgttggtgtttccagtttgcgccgcggcgtagcagaagctattgaagccgttgctcacggtgatgaaagcaccagtcgcgttgtcggcagagtcattgacgaaatcaagctaccgccaggaacgattattggagcggtggtacgtggaaacgacgtgatgattgccaatgacaatctgcgcattgagcaaggcgatcacgtaattatgttcctcacagataaaaagtttattaccgacgtcgaaagactcttccagccaagccctttcttcttgtaattaataaggcgtctaatgacgccttattatttccctttgattatcaaggattaattaaattcattcctggcaggaaaatggcttaacatttgttagacttatggttgtcggcttcatagggagaataacatgagcattattaaagaatttcgcgaatttgcgatgcgcgggaacgtggtggatttggcggtgggtgtcattatcggtgcggcattcgggaagattgtctctagtctggttgccgatatcatcatgcctcctctgggcttattaattggcgggatcgattttaaacagtttgctgtcacgctacgcgatgcgcagggggatatccctgctgttgtgatgcattacggtgtcttcattcaaaacgtctttgattttctgattgtggcctttgccatctttatggcgattaagctaatcaacaaactgaatcggaaaaaagaagaaccagcagccgcacctgcaccaactaaagaagaagtattactgacagaaattcgtgatttgctgaaagagcagaataaccgctcttaacaagcgccactaagcagaagaccagtggtaaaaaagtgatttactttcttgccactggcctcccagttcccccgattgccatgttttccttttcgcatgtaactgcctttccccttcttatttttctctacgcgctgtcggaataagggatcatgtagtaatgcttctatcgcattatcctttatctgccctttagtatgctgatatcgactcataaaaactccagttggttatttaacggcgcgagtgtaatcctgccagtgcaaaaaatcaacaaccactcttaacgccactcgccccttgttcaagagcttcaagaatgctacaataaacactgctatgagcagtcccacaacaggcatcgttaaggcgttgcaaggaacgctgcatactctgcaactcggctatccgtgcttcgacttcctgcaatctttcctgcacaatgcctttactctcctgacaggtatggtgttcaggatcgatgcggatgctcagcaactcgcggatgctctccagactgaaacctagttgtctggcatggcggataaatttcaatcgctggagatcgctttcggtatataggcgaaacccaccttcagtacgcacttcatgctccatcatctgctgtttttcgtaataacgaatcgtgtcgggtgttacttccgccatttttgccagctcaccaatgcgatacatacatactccattagttatcgttgattttgtccaacaacttgtcagcataatcgccgcgtaaaaaatcggtactcaatccagcttgtcgcagcttcaattccagtaaactcaatcgacggctaacctcttgatattgcggatcatcgtgacggatacctttgagaatatccagaagctgaattgcttctctccgttgctcaagttctggcggtaagcaaccggcattcttcagcaagcgataccccgcacgtaattccggtggcacgtgagaatcatcatccagtatcaatggttcgccgctacctgccaggttatcaaactcacctttcgcttgcgcttctgctatatggcgctctgcccactggtcaagtaaccacataaatactccaggggatgaacaaaaagagtacagctattgtagataagtggggatactacgggtataaaaaaacccgccggggcgggtttttttacgttgcttcagattactctgcagcagcttctgctttctcactacgatcaaccagctcgatgtaagccatcggcgcgttgtcgcctgcacggaagccacacttcagaatacgagtgtaaccaccggcacggctcgcgaaacgcgggcccagttcgttaaacagttttgccacgatctcgttatcacgagtacgggcgaatgccagacgacgattagcaacgctatcagtcttggcaagagtaatcagcggctcaactacgcggcgcagctctttcgctttaggcagagtcgtcttgatgatttcatgacgaaccagactacctgccatattgcggaacatagcctggcgatggctgctgttgcggttcagttgacgaccactcttacgatggcgcatgaccttatccttctcagtaaaaccttaacctgtgatccggttactcgtcagcgatgcttgccggtggccagttttccaggcgcatgcccagagacagtccacgggaagccagcacgtctttaatctcagtaagagattttttaccaaggttaggcgttttaaggagctcaacctcggtacgctgtaccagatcaccgatatagtggatagcttctgctttaaggcagttagcagagcggacagtcaattccagatcgtcaacagggcgcagcaggatcggatcgaactctggtttctcttctttcacttcaggctgacgtacatcacgtaagtcaacgaaagcttccagttgttcagccagaatggttgccgcacgacgaatcgcctcttcaggatcgattgtgccgttggtttccatttcgatgaccagcttgtccaggtcggtacgctgttctacacgcgctgcttcaacattgtaggcaatacgctccacagggctgtagcatgcgtcgaccagcagacggccgattgggcgctcatcttcttcgctatgaattcgggtagaagccggcacataaccacgaccgcgctgaactttgatacgcatgctaatagacgcgttctcatcggtcaggtggcagatcacgtgctgcggcttgacgatttcgacatcaccgtcgtgggtgatatcggctgcagtcacagggccaatgccagatttattcaaggtaagaataacttcatctttgccctgaactctcaccgccagccctttcaggttgagcaggatttccaggatatcttcctgaacgccttctttggtgctgtactcatgtagtacaccatcaatctcaacctcggtcaccgcgcaacccggcatgctactgagcagaatacggcgcagtgcgttacccagagtatggccaaagccacgctctaaaggctcaagggtcaccttggcgtgcgtgctactcacttgctcgatatcaaccaggcgcggttttagaaactctgtcacagaaccctgcattgtgtcctctctttggtactaagctttacttggagtaaagctcgacgatcaggtgttcgttaatgtccgcagacagatcagaacgctccggcttacgcttaaacgtaccttccatcttgccagcatcaacttccagccaggttggcttttcacgctgctcagccagctccagagcggctttcacgcgagactgcttcttcgctttctcacgaatgcttacaacgtcattcggactaacctgataagaagcgatgttaacaacacgaccgtttaccataattgctttatggctaaccagctgacgtgcttctgcacgagtggcaccgaagcccatacggtatacaacgttgtccagacgaccttccagcagagccaacaggttttcaccggtgttgcctttcagacgtgctgcttctttgtagtagttacggaactgacgctccagcacaccatagatacggcgaactttttgcttttcacgcaactgcacaccatagtcagacagacgcggtttacgcgcaccgtgctggccaggagcttgttcaattttacacttggtatcgatcgcgcgaacgccagacttaaggaataagtcggtgccctcacgacggctcagcttgagcttaggacccaaatatcttgccattttctttctccaacaaacctggaaaacgaggcgttatacgcgacgttttttcggcggacgacaaccgttatgagggatcggagtcacatcagtaatgttagtgatgcggaaacctgcggcgttcagagcacgaatagtagattcgcggcctggacccggacctttaaccataacttccagattcttgatgccgtattctttcacggcgtcagcgcaacgctctgctgcaacctgagctgcaaacggagtggatttgcgagaaccacggaaaccggaaccaccggctgttgcccaacccaacgcgttaccctgacgatcagtgatagtcacgatggtgttgttgaaagaagcatggatatgagccacgccgtcagagacttgttttcttacacgtttacgtgcacgaattggtgcctttgccattattcaatcaccccgattatttcttgatcggtttgcgcggacccttacgggtacgtgcgttggtcttggtacgctgaccgcgaaccgggagaccacgacgatgacgcaaaccgcgatagcaaccaagatccatcaggcgcttgatgctcatgctgatttcacggcgcagatcaccttcaacgacaaatttggcaacttcgtcacgcagcgtgtcgatttgtccttcagacagctcactgatcttaacatcttcagcgatacccgctgcagccaggatggctttagaacgggtcttgccgacgccataaatgctagttaatgcgattacggcatgcttatgatcaggaatgttaatgcctgctatacgggccactatgcactcctactatttaatatgtacgttccatgctgaaaagcccgttttcaggatactcaaatggaaacgcacagacatacaaaagattggctggctaatctagccagctcaacccaactttgcaagaaaaatatgcgaaaaaatcagccttggcgctgtttatgcttcggctcggcactgcaaatcacacggatgacaccatcacgcttaacgattttgcagttacggcataatttcttgacggaagcacgaactttcatttttactctccgtaacttctcgggcgaccaattatcggccgtagcctttcaggttcgccttcttcaatgcagactcatactgactggacatcatcagagtttgcacttgagccataaagtccataatcacgacaacaacgataagcagactggtcccaccgaagtagaacggtactttcattgcatcacgcatgaactccgggatcaggcagataaaggtaatatacagcgcaccaaccagggtcaggcgggtcattactttatcgatatacttcgccgtttgctctcccggacgaattcctggtacaaatgcaccggacttcttcaggttatctgctgtttcacgcgggttgaaaaccaacgccgtgtagaagaaacagaagaagatgattgcagacgcatagagtaacacataaagcggttgcccaggctgcaaatacaggctaattgttgtcagccagttccaaccagtaccgcccccgaaccaactcgcgatggtcgccgggaacagaataatactggaagcgaagattgccgggattacccccgccatattcactttcagcggtaaatgtgtgctctgtgcagcatagacacgacgaccttgctgacgtttcgcgtagtttaccacaatgcggcgttgaccacgctcaacaaatacaacaaagaacgtcactgcaaatactaatactgcaaccaacagcaacacgaggaagtgcaggtcgccttgacgcgcttgctcgatagtatgggcaatggctggcgggagtcccgcgacaataccggcgaagataatgatactaataccgttgccgatacctcgttcagtaatctgttcgcccaaccacatcaggaacatggttcctgtgaccagacttacaacagcggtgaagtagaatgcaaagcccgggttaatcaccaggccttgcataccaggcatattcggcagaccggtagcaataccgatgctctggaatattgccagcaccagagtaccgtagcgggtgtactggctgatcttacgacgaccagactccccttctttcttaatttctgccaacgttgggtgaaccaccgtcagcagctggataatgatgctcgcgctaatatacggcatgatccccagagcaaagatagaagcacggctgagagcaccaccagagaacatgttaaacatctcaatgatggtgcctcgctgttgctcaagcagtttggcaagtacagcggcatcaataccagggatcggaataaaagagccaatacggaacacaatcagcgcaccgataacaaacagcagtctgcgtttcagctcgcctaagccacctttggcactttgaaaatctaatcccggttgtttagccatctgctacttattcctcgattttaccgccagcagcttcgatagcagcacgagcgcctttagtaacacgcaggccacgaacagttaccggagtcgttacttcgccagccaggatcactttcgcgaactcgatctggataccgataatgttagccgctttcagcgtgttcaggtctactacaccgccttctactttagccaggtcagacagacgaatttcggctgtaatcgctgctttacgagaagtgaagccgaatttcggcagacgacggtacagaggcatctgaccaccctcgaaaccgcgacgtacgccaccgccagaacgagacttctgacctttgtgaccacgaccaccggttttaccgaggccagaaccgataccacgacccaggcgtttacccgcctttttggagccttcggccggagacagagtatttaaacgcatctcttactcctcaactttaaccatgaaggaaaccgcgttgatcataccgcgaatagcaggagtatcctcgcgctctacggtgtgaccaatacgacgcagacccaggccaagcagcgttgccttgtgtttcggcagacgaccgattgcactgcgggtttgagtaattttaatagtctttgccatggtttatttccccagaatttcttcaacggatttaccacgcttggcagcgaccatttctggagaattcatattttccaggccatcaatagttgcacgaaccacgttgatcgggttggtggaaccataggctttagccagaacgttatgaaccccagcgacttccagaacggcgcgcattgcaccaccggcgatgataccggtaccttcggaagccggctgcatgaatacgcgagaacccgtgtgaacacctttaacagggtgttgcagagtgccgttattcagcgcgacgttaatcatattgcgacgggctttttccatcgctttctggatcgctgctggaacttcacgcgctttaccgtaaccaaaaccaacgcgaccgttaccatcgccaactacagtcagagctgtgaaggagaaaatacgaccacctttaacggttttagatacgcggtttaccgcgatcagcttttcctgcagttcgccagcttgtttttcgatgtgagccatcttacacctctaccttagaactgaaggccagcttcacgggcagcatctgccagtgcctggacacgaccatgatattggaacccggaacggtcaaaggatacatctttgatgcctttttccagagcgcgttcagcgacagctttacccacagctgcagccgcgtctttgttaccggtgtacttcagttgttcagcgatagctttttctacagtagaagcagctaccagaacttcagaaccgttcggtgcaattacctgtgcgtaaatgtgacgcggggtacgatgtaccaccaggcgagttgcgcccagctcctggagcttgcggcgtgcgcgggtcgcacgacggatacgagcagatttcttatccatagtgttaccttacttcttcttagcctctttggtacgcacgacttcgtcggcgtaacgaacacccttgcctttataaggctcaggacgacggtaggcgcgcagatccgctgcaacctggccgatcacctgcttatcagcgcctttcagcacgatttcagtctgagtcggacattcagcagtgatacccgcaggcagctgatggtcaacaggatgagagaaacccagagacaggttaatcacattgcctttaaccgctgcacggtaacctacaccaaccagctgcagcttcttagtgaagccttcggtaacaccgataaccatactgttcagcagggcacgcgcggtaccagcctgtgcccaaccgtctgcgtaaccatcacgcggaccgaaggtcagggtattatctgcatgtttaacttcaacagcatcgttgagagtacgagtcagctcgccgtttttacctttgatcgtaataacctgaccgttgatttttacgtcaacgccggcaggaacaacgaccggtgctttagcaacacgagacattttttcctccgattaggctacgtagcagataatttcgccaccaagaccagcctggcgcgctgcacgatcagtcataacacctttagaggtagaaacaactgcgatacccagacccgccataactttcggcagctcatctttacgtttatagatgcgcagacctgggcggctgacacgctgaatgctttctacaacagctttgccctggaaatacttcagagtaagttccagttcaggcttggtgtcgccttcaactttaaaatcttcaataaaaccttcttccttcagcacgttggcgattgccactttcagcttggaggaaggcatggtgaccgcagctttgttcgcggcctgaccgttacggatacgggtcagcatatccgcgatcggatcttgcatgctcatctgtctttactcccgtgattcaattggtgacaattaccagctagcctttttcagacccgggatttcaccgcgcatagcggcttcacggaccttaatacggctcaacccgaacttccgcaggaaaccatgcggacgacctgtttgacggcagcggttacgctgacgagacgggctggaatcacgcggcagagtctgcagcttgagaacagcgttccaacgatcttcgtcggaagcgttcacatcagagatgatcgctttcagttcagcgcgtttcgcgaagtatttatcagctaaagctacgcgttttacttcgcgtgctttcatactttgcttagccatttagtaaccctaccttacttgcggaacgggaagtcaaaggcagccagcagagcgcggccttcttcgtcagatttcgcagtagtggtaatggtaatatccaaaccacgaacgcggtcgactttatcgtagtcgatttctgggaagatgatctgctcacggacacccatgctgtagttaccacgaccgtcgaaagacttagcggacaggccacggaagtcacggatacgaggtacagcaatagtgatcaggcgctcaaagaactcccacatgcgttcgccacgcagagttactttacagccgatcggatagccctgacggattttgaagcctgcaacagatttgcgtgctttggtgatcagcggtttttgaccggagattgctgccaggtctgctgctgcgttatccagcagttttttgtcagcgatcgcttcaccaacacccatgttcagggtgatcttctcgacccgagggacttgcatgacagaattgtagttaaactcagtcatgagttttttaactacttcgtctttgtagtaatcatgcagtttcgccatcgtactactccaaattacttgatagtttcgctgttagacttgaagaaacggacttttttaccgtcttcgaatctaaagcctacacggtcagccttgccggttgccgcattgaagattgctacgttggaaacctgaatagcggcttctttttcaacgatgccacccggttggttcagggccggaaccggcttctgatgtttcttaaccaggttgataccttcaacaatgaccttgccggaagacaggacattcttaactttaccgcgtttacctttatctttaccggttaacacgataacttcgtcatcacgacggattttcgctgccatgattcgctccttagagtacttctggtgccagagagataattttcatgaacttctcactacgaagctcacgagttaccggcccaaaaatacgcgtaccgataggctgctcgctgttgttgttcagaagaacacaagcattaccatcgaagcgaatgacagaaccgtccgggcgacgaacacccttcttggtgcgcaccactaccgccttcagcacatcaccttttttgaccttaccacgcggaattgcttctttgatggtgatcttgatgatgtcgcctacgcctgcgtagcgacggtggctgccacccagaaccttgatacacattacgcgacgtgcaccggagttgtcggcgacgttcagcatagtctgttcttggatcattttagtgctccgctaatgtcaactactactgagacccgaaaatcaggtcgttaaaaatccccatatcgagggcgcggcattataacaccgcttcaaggatatgggtagaaaaaataaacggctcatttctgagccgtttattcgtattgagagagtgtactgtattacagaaccgctttctctacaacgcgaaccagcgtccaggatttagtcttggacagcggacggcattcgcggatttcaaccacgtcaccgataccgcattcgttgttctcgtcatgtacgtgcagtttggtcgtacgcttgatgaatttaccgtagatcgggtgtttcacaaaacgttcgatagcaacaacaatggatttctccattttgtcgctaacaacgcgaccttgcagagtacggattttatcggtcattacgcacccgccttctcgttcagtaaagtcttaacgcgtgcgacatcgcgacgcacttgcttcaacaggtgagactgttgcagctggccacttgcagcctgcatacgcaggttgaactgctcacgcagcaggttcagcagctcggtgttcagctcttcaacgctcttctcacgcagctcttttgctttcattacatcaccgtcttagttacaaaggtggttttaatcggcagtttcgctgctgccagcttgaatgcttcacgggccagctcttccggaacaccgtccatttcatacaggactttacccggctgaatcaaggcaacccaatactccacgttacctttacctttacccatacgcactgccagcggcttttcagtgatcggtttgtccgggaacacacggatccagatcttaccttgacgcttaactgcacgggtcatagcacgacgtgctgcttcgatctgacgggcagtcagacgaccacggccaacagctttcagaccgaagctgccgaagctaacatccgtaccctgcgccagaccgcggttacggcctttgtgcattttacggaattttgtacgctttggttgtaacatcagcgacgctccttatttacggcctttacgctgctgctttttaggctgagcagccggtttttccggttgttcaacagcagccataccacccaggatctcgcctttgaagatccacactttaacgccgattacaccgtaagtggtgtgcgcttcagaggtgttgtagtcgatgtcagcacgcagagtgtgcagcggtacgcgaccttcgcggtaccattcggtacgtgcgatttccgcgccgcccagacggccgctaacttcaactttaatacctttagcgcccagacgcattgcgttctgtacagcacgcttcatagcacgacggaacataacgcgacgttccagctgagaagtgatgctgtcagcaaccagttttgcgtccagttcaggcttacgaacttcggcgatgttgatctgtgcaggaacgccagcgatgtccgctacgaccttacgcagtttttctacgtcttcaccttttttaccgataacgatacccgggcgagcagtgtgaatggttacacggatgctcttagccggacgctcgataacgatacgagatacggacgctttagccagttccttagtcaggtactgacgtactttaaaatcgctgtccaggttgtcagcgaattctttggtgttcgcaaaccaggtagagttccatggttttacaatacccaggcgaataccattaggatgtactttctgacccattgctagtctccagagtctcagcgatcggacacaaccacagtgatgtggctggtgcgcttcaggatgcgatctgcacgaccttttgcacgcggcataatgcgcttcatgctcgggccttcgtctacgaaaattttcgtaactttcagatcgtcaatgtcagcgccatcgttgtgttcagcgttagcaatggcagattccagaactttcttgaccagtacagccgctttcttgttggtgtaggtcaaaatatccagagcctggctcactttcttaccgcgaatcaggtcagcaacaaggcgaaccttctgagcagaagaacgagcatggcgatgtttagcgatagtttccatctcttcctcctaccttatttcttcttcgcttttttatcagcagcgtggccgcgataagtacgagtcggtgcgaattcacccagtttgtgaccaaccatttcgtcggttacaaataccggaacgtgctgacgaccattatggacagcgatggtcaaaccgatcatgttaggaaagatcgtactacgacgggaccaagtgcgcaggggcttcttgtctccgctttccaccgctttctctaccttcttcagcaagtgcaggtcaataaaaggacctttcttgagagaacgtggcatggcttatcctctaaaattatttgctacggcgacgtacgatgaatttatcagtacgcttgttgctgcgggtcttcttacctttggtctgaacgccccacggagttaccgggtgcttaccaaagttacgaccttcaccaccaccatgtgggtggtctaccgggttcatcgcggtaccgcgaacggtcggacgaacaccacgccagcgtgcagcacctgctttacccagaacgcgcagcatatgctcagcattgccaacttcgcccagagttgcacggcagtctgcttctactttacgcatttcaccagaacgcagacgcagggtgacataagcaccatcacgagcaacgatctgaacgtaagtaccagcggaacgtgccagctgaccgcctttacctggtttcatttctacgttatgaacagtagaaccaaccgggatgttgcgcatcggcagggtgttacctggtttgattgcagcatcaacgccagactgaatctggtcgccagctttcaggcctttaggggccaggatgtaacggcgttcaccgtctttgtacagaaccagcgcgatgttcgcggaacggttcggatcgtactcaagacgttcaacaactgccgggataccgtctttgttgcgtttgaagtcaacaatacggtaagcctgcttgtggccaccaccgatatgacgagtggtgatacggccattgttgttacgaccaccggatttgctgtttttttccagcaacggagcaaaaggtttgcccttgtgcagctcagggttaaccactttaactacgtggcgacgacccggagatgtcggtttacatttaacaactgccattgtattactcctccgacttactcagcgccgccaacgaagtccagattctggccttctttcagggtgacgtaagcttttttccagtcgctacgacgaccgatacgctgtccgtgacgtttaactttccctttaactaccagggtgttaacgacttcgacttcgacttcaaacagtttctgcacagcagctttgatttctgctttggtcgcgtctttagcaactttgagtacgatggtgttggatttttccatcgcagtagacgctttttcagaaacgtgcggtgcacgcagcaccttcagcagacgttcttcacgaatcatgccagcatctcctcaacttgcttaacagcatcagcagtcattacgactttgtcgaaggcgatcaggctaaccgggtcgataccagttgcatcgcgtacgtcaaccttgtgcaggttgcgcgcagccaggaacaggttttcgtccagctcaccggtgatgatcagcacatcttccagagccatgtctttcagtttctgtgccagcagcttagttttcggcgcttctacagagaacttctcgacaacgatcagacgatcctgacgtaccagttcggacaggatgcttttcagcgcgccgcggtacatcttcttgttaactttttgactgtggtcctgcggacgagcagcaaaggtcacgccaccagaacgccagatcgggctcttgatagaaccagaacgcgcacggccggtgcctttctggcgccacggttttttaccggaaccagttacttcagcacgagtcttctgagcacgagtaccctgacgagcaccagctgcataagcaacaacaacctggtgaaccagcgcttcgttgaaatcacgaccgaaggtagtttcggaaacagtcagcgcgctctgcgcgtctttcaatactaattccattgctatctccttacgccttcacagctggtttaacgatcaggtcgctaccggttgcacccgggacagcacctttaaccagcagcaggttgcgctcagcgtcaacgcgtactacgtcaaggctctgaacggttacacgttcgttacccatctgacctgccattttcttgcctttgaacactttgcccggagtctggttctgaccgatagaacccggaacgcggtgagacaaggagttaccgtgagtagcgtcctgggtacggaagttccagcgcttaacggtacctgcgaaacctttacctttagaggtgccagttacgtcaacttttttaacgtcagcaaacagttcaacgctaatgctctgacctacagtgaactcttcgccttcagccaggcggaattcccacagaccacggccagcttctacgccagctttagcgaagtggccagcttcaggcttggtcacacggttagcttttttagcaccggtggtcacctgaatagcacggtagccatcgttagccaggtctttaacctgagtaacgcggtttgcttcaacttcgattacggttactgggatagaaacgccgtcttctgtgaagatacgggtcatacccacttttttaccgactaaaccaatcattgtttcaacctctcaatcgctcaatgacctgattaacccaggctgatctgcacgtctacaccggcagccagatccagacgcatcagagcatcaacggttttctcggttggctcaacgatgtcaaccagacgcaagtgagtacggatttcgtactgatcgcgcgcgtctttgttgacgtgcggggagatcagaacagtgaagcgctctttgcgtgtcggcagcgggatcggaccacggacctgcgcaccagtgcgcttggcagtctcgacgatttccgcggttgcttgatcgatcagacgatgatcaaacgctttcaggcggatacggattctttggttctgcatgagaccagagctccaattattttataaacgaaaatgattactcctcagacccattacgattgatgggagagtgtaaccgttcttacgtagctccccgattgggagcattgttaggtagccaaattcggctaactgaggttcagattgaacctgctgtcaactacgacaagcccgcgcattatacatacttaaccaccgaacgcaagcgtattgctagtaaagtaaacagccttcgggttatctctcaagttcgttcagtgcatttttgacacgctctcttaaaccggctttctcttcgctttcttccacagtattttcttcgtcttcagaagaagagggggcattctcaaccgcgacgcctgggtcatcttcctcctcgacggattcgacgacggggagtggctgttttttgaagaaatagtgttgtgtactttgtttaaaagcgggcgtttcagcctctacagtgacttcggcttttactatccaaagcacccatagctgcctggcatacccaccaaccagcaccattcctgcaaaccacaggcaaatcagtaataaacaaattacatatattatggtgctgtgtttttgtcgggagaagataccagggtgacctgtttctttctgctcacgcgcggcgatatagaattcaaacattataatcccttgtgacgtaaaaactgcaaaacaaaagtcctacgcaggaattatttacgttttacgagaacccttcaatatgaattaaattacggcattaaaaataagaaaaaagcctgacaaatgaagcattttaaaaacagaaacattcatatttaaaatgttaaattgaattgatattttaaatatgaataatttattcgttctgacagtacgaataagatatgccgtcaacaaatgcaaaaagggcgccgaagcgcccttttcaattcaaaactaattaacgtgtaattagcccagaactttagcaacaacgcccgcgccaacggtacggccgccttcacggattgcgaaacgcagaccgtcgtccatcgcgatcgggtggatcagggtaacaaccattttgatgttgtcgcccggcattaccatctctacgccttccggcagttcgatggtaccagtcacgtcagtagtacggaagtagaactgcggacggtagcctttgaagaacggagtatgacggccgccttcatctttggacagaatgtacacttcagattcgaacttggtgtgcggcttgatggtgcccggcttagccagtacctgaccacgttcgatttcttcacgtttgataccacgcagcagaacacctacgttctcaccagcacggccttcgtccagcagtttgcggaacatttcaacgccagtacaggtagacttctgagtctctttgataccaacgatttcaacttcttcaccaactttgatgataccgcgttctacacgaccggtaacaacggtaccacgaccggagatggagaatacgtcttcgatcggcagcaggaacggcttgtcaatcgcacgctctggttccggaatataagaatccaggaagccagccagttccaggattttcgcttcccactctgcgtcgccttccagcgctttcagagcagaaccacgaacgatcggagtgtcgtcgcccgggaagtcgtactgagacagaagttcacgaacttccatttcaaccagttccagcagctcttcgtcatcaaccatgtcgcatttgttcaggaacacgatgatgtacggaacgcctacctgacgacccagcaggatgtgctcacgagtctgcggcatcgggccgtcagtcgcagcaactaccaggatcgcgccgtccatctgagcagcaccggtgatcatgtttttaacatagtcggcgtgccccgggcagtctacgtgtgcgtagtgacgggtcggggtgtcgtattcaacgtgagaagtgttgatggtgataccacgagctttttcttccggcgcgttatcgatctggtcgaatgcacgagcagcaccgccgtaggttttagccagtacggtggtgattgcagcggtcagagtagttttaccgtggtcaacgtggccgatagtaccaacgttaacgtgcggttttgtacgttcaaatttttctttagacacggctatattccttactatagtgctctccccttcaggagagagcacgggactttggtattaacccttaggcttatttaccacgggcttcaattacggcctgagcaacgttactcggcgcttcatcatacttcaggaattccatagtgtaacttgcacgacctttggtcagagaacgcagctgagttgcgtatccgaacatttcagacagcggtacttcagcgtggatcttaacgccagtaacttcagattcctgacctttgagcataccacgacgacggctcaagtcaccgataacgtcaccggtgttctcttccggagtttctacttcaaccttcatgatcggctcaagcagaactggtttcgctttcttaaagccttctttaaaggcgatagaagcagccagtttaaacgccagttcagaggagtcaacgtcatggtaagaaccgaagtgcagacgaatacccatgtctactaccgggtagcctgccagcggacctgctttcagctgttcctggatacctttatcaacggccgggatgtattcgccagggattacaccacctttaatgtcgttgatgaactcgtagcctttcgggttactacccggctccagcgggtacatgtcgataacaacatgaccatactgaccacgaccaccagactgtttcgcgtgtttaccttcaacatcggtaactttctggcggatagtttcacggtaagcaacctgcggtttacctacgttcgcttcaacgttgaattcacgcttcatacggtcaacgatgatgtcgaggtgcagttcgcccatacccgcgatgatggtctggttagattcttcgtcagtccatacacggaaagacgggtcttctttagccagacggcccagagccagacccattttttcctggtcagctttggttttcggttcaactgcgatggagattaccggctcagggaattccatacgttccagaatgatcggcgcatccgggtcacacagggtgtcaccagtggttacgtctttcagaccgatagcagcagcgatgtcgcccgcgcgaacttctttgatctcttcacgtttgttagcgtgcatctgaacgatacgaccgaaacgctcacgtgcagctttcacggagttcagtacggtatcaccagagttaaccacaccggagtaaacacggaagaaggtcaggttaccaacaaacgggtcggtagcgattttgaacgccagtgcagagaacggctcgtcatcacttgcgtgacgttcagccggagtgtctttaccgtcgtccaggataccgttgatcgcaggtacgtcaaccggggatggcaggtaatcaattaccgcatccagcatcgcctgaacacctttgttcttgaacgcagaaccacaggttaccaggatgatttcgttgttcagaacgcgctgacgcagagcacctttgatttctgcttcagtcagttcttcaccacccaggtatttttccatcagctcttcagaagcttcagctgcggattcgatcaggttctggtgccattcgttagccagttcaaccatgtctgccgggatatcttcgtattcgaaggttacgccctggtcagcgtcgttccagttgatagctttcattttcaccaggtcaacaacaccggtgaaatgttcttcagcaccaatcgccagctgcagcggaaccgggttcgcgcccagacgggttttgatctggttaacaactttcaggaagttcgcacccatgcggtccattttgttaacgaacgcaatgcgcggaactttatatttgtttgcctgacgccatacggtttcagactgcggctgaacaccaccaactgcgcagtaaaccattaccgcaccatcgagaacacgcatggaacgttctacttcgattgtgaagtcaacgtgccccggggtgtcgatgatgttgatgcgatgcggctcatactgcttagccataccagaccagaatgcagtagtcgcagcggaagtgatggtaataccacgttcctgctcctgctccatccagtccatggttgcagcgccgtcatgaacttcaccgattttatggtttacaccggtgtagaacagaatacgttcggtagtagtggttttaccggcgtcgatgtgcgcactgataccgatgttacggtagcgtgcgatgggtgttgtacgagccatttgtttcctcgtttatcttttaggcgttcaatttaagtagcccaaagcgggctgcttactggaagcgcccgcctggtgactaaaactccgaagggataaccaacggtagtgtgcgaacgccttgttggcttcggccatacggtgaacgtcttcacgtttcttaactgcagtacctttgttttctgcagcatcagaaagttcgttcgccaggcgcagagccatggatttatcaccgcgtttacgagcagcttcaacgatccaacgcattgccagagcattacgacgaaccggacggacttcaactggtacctgataagtagaaccaccaacgcggcgagacttaacttctacagtcgggcgcacgttttcgagagctacttcgaatgcttccagttcagatttaccagagcgctgagccagggtctccagcgcgctgtatacgatagattcagcagtagattttttaccatctaccatcaggatatttacaaatttagccagcagttcacttccgaacttcggatccggcagaattttacgctgaccaatgacgcgacgacgtggcatggaaatactccgttgttaattcaggattgtccaaaactctacgagtttagtttgacatttaagttaaaacgtttggccttacttaacggagaaccattaagccttaggacgcttcacgccatacttggaacgagcctgcttacggtctttaacgccggagcagtcaagcgcaccacgtacggtgtggtaacgaacacccgggaggtctttaacacgaccgccacggatcaggatcacggagtgctcctgcaggttgtgaccttcaccaccgatgtaggaagtcacttcgaaaccgttagtcagacgaacacggcatactttacgcagcgcggagttcggtttacgaggagtggtagtatatacacgagtacatacgccacgtttttgcgggcatgcttccagcgcaggcacgttgcttttcgcaactttgcgagcacgtggtttgcgtaccagctggttaactgttgccattaaatagctcctggttttagcttttgcttcgtaaacacgtaataaaacgtcctcacacaatatgaggacgccgaattttagggcgatgccgaaaaggtgtcaagaaatatacaacgatcccgccatcaccaggccatctggctggggtgcttaaccgtaagtctgacgaaatcagtatagtcaatgagaatgatgtcgttgctaatttgaccagtcaaaccgcgggcaataaggtcttcgttcagggcatagaccttaatgggggcattacgcagactttcaaggtagcggttaccgtcaactgcggcagttacgccatcttgcaataatagcagttcgtctccttcactgagcagacgcagcagcgcagcaaaatccgtcagccagggactgcgatgtaatgtgtgcagcataaacgcctcaaaacctcaaaataacatcgtagttggcgagttcgcggcgtaaggcatctgcttcgagcggcgtggcttcgacaacaaagggtgtctgcggatctaacccgcgttcgcgcagactagccgcacaaacccagcactgttcaatgtcgtacagacccaacaatttaaaagtggcaatgtaatcacgcgccagcactgcatcgggcttttgtcctggcagcagctgaaaaacgccatcagctataaagaagacagccagatcgtcagttaatgcggaagttgccagtaaagcatctaaaccttcccggcctgcggctgtaccatgaggtgcagtagaaaaaacaaacgcaattcgtttcatcagaactgtaccaccctgtcacaggtcaggctggcttccgccagcgccccaagtccgcttaaggtaaatccctgctgaaggttactgctagccagccccagtcttccggcctccgtttcatcaacaacgccacggcgtaatgctgccgctacgcagatattcagcgccacaccatgttgcgcattcagttgttgccaggcccgtacgaggtcaaattcgtcacttgccggagaggtcaattggttagcgttatagaccccttcccgatagaaaaagacgctgcttaactcatggccatctgctatcagcgcctgcgcaaactgaaaagcactactcgcctgttgcgtaccgtatgctggcccggtcaccacgatggcaaaacgcattacttatcttgcccctggaaatcaccgctcttgaactggcggatgtagagatagacagtgtgtttggagatgttcaggcggtcagcaacctggttgatcgcatctttaatatcgaagatccctttctcgtagagattcagcacgatctgacgatttttggcgttattagaaacattgcgatcggcattcacttcttcgatggtgaactccagcgtttgggtaaccagatcttcaacagaagaggcaaagttgacgctactaccgacatccggggtttctggcggcacaaaggtgctcataatctggctgaagggaacatcaagattcatattgatgcacagcagaccaattacacgctgttcgcggttacgaatcgcgatagtcagggacttcattaatacgccgcttttggcgcgagtaaagtagcatttagaaacgctgctatccgctcccgtcatatcgtgcagcatacgtagcgccaggtcagtaattgggctaccaatcttccggcctgtatgttcaccgttagcaatgcgaatggcactacattttagatcctgcaaagagtgcaaaacgatttcacagtgggagccaataagcatcgctaacccgtccaccaccgcttcgtaggatttcagaatatcaaaatcggtctggtcgaaaggacgttgatccagtaaatccaactcactggtttcgttggttaaaaggctcctggacatgaaaaaaaacactccttttcaggagcctgtcgttaacttttcagggcaggctcattaatgatgcgggtaactaaattaatacagcggaggttccgctttccagcactaattatatccggcctgtaataaaaaaaccgccgcctggtcaggcggcggttcttaatgcttattttttagcagaatctgcggctttcgcatcagcttccggctttgcatcagccttcggcgctggtttcacatccagcagctctacgtcaaacaccagggtagaattcggtgggatccccggaacacccgctttgccgtaagccagttctggtggaataaccagtttgatcttaccgcctttcttgatgttcttcagaccttctgtccaacccgggataacaccgtccagacggaaagaaagcggttcaccacgggtgtaagagttgtcgaactctttaccgtcgatcagcgtacctttgtagttcactacaacagtatcgctgtctttcggtgcttcgcctttaccggcttctactacctgataaaccagaccagtactagaggttttcacacctttctctttggcaaatttctcgcggtactctttaccttttgcttcgttatcagccgcgtctttttccatcttcgcctgagcagaagacttcacgcgagcttcgaatgcttgtagagtctgttcgatctcttggtcggagagtttgcttttatcagcaaatgcatcctgaacaccagcgatcagctgatctttatccagtttgatgcccagtttttcttgttcttttagagagttttccatgtaacgacccaggctggcacccagtgcataagcacttttctgatcgtcatttttgaacgctgctttgctgtcagcagctgtagcaggttttgcagcttcagcagcaaaagtgattggtgcatgcagggcaacggccattgtggtcgccagcagcgttactttaaacagacttttcatccatatctccaggatcggggcatctcaccccagggttaactattatcagaagggtactataaagcgttgtcgaacaaatctacatacagacacgccctattatcatctattttcagactctttttgtttaaattagtttcgatgaccgcgaaatgagtgctgtctcgggcagcaaagttaagtagaatccgcggcgaccattcgacaaaagaggtgaatcatgcaggatttaagtttggaagcacgcctggcagagctggagagccgactggcttttcaggaaatcaccattgaagaactgaacgtcacggtgaccgctcatgaaatggagatggcgaaactgcgcgatcatctgcgtctgctgaccgagaagttaaaagccagccagccgagcaacatcgcgagccaggctgaagaaacgccaccgccacattattgaggcgtaaaaaaagcggggattccccgcttttttgtcactttttcggtattagtggcaaccgcaaccgccgttgcctttaccgccacagcagccttcgccaccgtgttcatgaccgtgatcgtggccatgaccgccgcagcaaccgtcgtggtcgtgatcgtggtggtgatcgtgcgcgccgtgaacgtgaccatgagccagttcttcttcagtcgcttcgcgaatcgccacaacttcaacgttgaatttcaggttctgaccggccagcatgtggttaccatcaaccacgacgtgatcgtcttcaaccgcagtgatttcaaccggtaccggaccctggtcggtttcagccaggaaacgcatacctacctgcagttcatcaacgcccataaatacgtctttaggaacacgttgcaccaggttttcgtcgtactgaccgtaagcgtcgttcgcgccaacagcgacatcaaatttgtcgccaacttcatgaccttccagcgccgtttccaggccagagatcagggaaccgtgaccatgcaggtagtccagcggcgcactcaccggagactcatcaaccaacacaccgtcttctgtacgtacctgataggccaggctgaccaccaggtcttttgctactttcatgatatctcctgagcatgggaagaatagtggcgcagattgtagcggaattctgcagccgtgtactcactagcttaaaaaaactcggcgcatatcgttagtccggatgaaaaatcccgatcacttgctcatctttgcgaacgtgatcgcgggcttctttgtctgcttctcgcatctgatgtccgcacttaacacattcaacaatatcaatattattttcgcgccacatcgccatactatcctgcgcctgacaggccgggcattttgcgcccgcaataaaacgttttcggattgccatctttaccctttactcaaattcatcccagccgtccagctggcgtcgttcttgttgcatttcacgctggaaaatctcttccagttcgcgtcgggcttccctggcgcgagaaatttgtacggtatcggcatgcattgggatgagctctcgcagcatccgcatatccaggcggcgaaaatgcagttgcgctcgctgtgcctgatgcggatgcatgccaagcgtgaccagcgtcttgcgccccagctctaacgcactggagaatgtttcacgggaaaactgcgtcacccctgcctgtaataactcatgcgcttccacacgtccgcgcgctcgcgcaagaatatgcaaatgcggaaagtgctgttggcatatttccaccagcttcatggtgtcttccggctcgttacaggtaatgacgatagactcagcggcctctgcacccgcagaacgtaaaagatcgacctgcgtggcgtcgccgtaataaactttgtagccgtatttacgcatcaggttaacggcgctgatatcccgctccagcacggtaatgcgcattttatttgccatcagcaaacgaccaatcacctgaccaaaacgcccgaagcccacgacaatgacctggggtttatcatcgttgacccacggtttttcgtcttcttcttccggtccgttaaactggcgggatagccatttatccaccagcttcatcagcaacggcgtggtcatcatggaaagcgtcaccgtcaccagcaacaacgccatctggtcgccctggaataagcgttgactagaagcggtagaaaagaggacaaaggcaaactcaccaccctgactcaacacgccagcaaactgcatccgctcactgctacgcacgccatacaatcgcgccagcagatacagcacgagaattttcaccgccaccagcacaaccacgcttatcactacccacaacagatgggtataaagcaccccgaggttgagactcatgccgacagagataaagaacaaaccgagcagcaagcctttgaagggatcgatagccgtttccagttcatggcgatattcactttccgccagcagcacgcccgcaataaatgtaccgagcgccatgctcagccccagcgcatccataaacaatgcggaacccaacaccagcagcagcgtcgcggcggtgaacacttcccgcacgccagaagctgcaataaagcggaataccggacgcagtaaatagcgcccaccaatcagcatgccgacaaacgccagcaccttcatgccgaccttcatccagtcgaaatgttcgtctgcgctccccgccaacaacggcactaacgccagtgctgggattactgccagatcctgaaacagcagaacgctaaacccgagctggccggattcgctgcgattcatccctttctcacgcatcaattgcaacgccattgcagtactagacatcgcaaggccaatgccaccgaccaccgccgcctgccaggcgaaatccgtcagcatcaataatcccgccagcaacgccgcgcttaacagcacctgtgccgcgcctacgccaaaaatgctacgccgcagttgccaaagtttggagggattcaactcaaggccgatgataaacatcaggaataccacgccgagttcgctaaagtggaggatctcatcgacgtcgctaataaaccccagcccccacgggccaattgcaatccctgccagcaaatatcccaacacagcgccaatacccagccggcttgccagcggcaccgcagccaccgccgcgaagagaaacagcactcctgcgagtaaaaaatcggaaccttccatcagcggcctcctggagacagcggatttgccagccagtcaccgtaggctctggcgtggctcgccagctcctgtgcgctttgccgtctcgcccagtaaataatgatgggacttaaccaatgcatccggcacatgcccgccgccagttcaaaggggcgcagcacatcgctcatcgggtagcgattcagcgcgtcataacggtaagcactttccggctcgccggtggtaatcacgctacgccagtactttcccgccagttggtttcctcccggcccgctggcaaaaccacgacttaatacccggtccagccactctttcagtagcgccgggcagctataggtataaagaggatgctgaaagacaatcacctcgtgctcgcgcagtaatgcctgctcacgggggatatcaataaaaaaatcgggatagtgcgcgtaaaggtcgtgcacggtaacattgctgagctgcgtggccggtttaagcagtacccggtttgccacgctgtcctgagattccggatgggcatacagcagcaaaactttcgctggctgagacatcatccccctcccggtatggtttttgtgtatagtcgctgttttgggctaccattgcgcccggtgcggcagctcgcccatacattacattatcataatgataagttaacatagtctgaacatacggcaccttatgattgttttctccagcttacaaattcgtcgcggcgtgcgcgtcctgctggataatgccaccgccaccatcaaccctgggcagaaagtcggcctggtgggtaaaaacggctgtggtaaatctaccctgctggcattgctgaaaaatgaaatcagcgccgacggcggcagctacacctttccgggaagctggcaactggcgtgggtgaatcaggaaacgccggcgttaccgcaagcggcgctggaatatgtcattgacggcgaccgtgaatatcgtcaactagaagcgcagctacacgacgccaacgaacgtaacgacgggcacgccattgcgaccattcatggcaagctggatgctattgacgcatggagtattcgctcccgtgctgccagcctgctgcacggcctcggtttcagcaatgaacaactggagcgcccggtaagtgatttttccgggggctggcgtatgcgtcttaaccttgcccaggcgctgatttgccgtagtgacttgctgctgctcgacgaaccgactaaccacctcgatctcgatgccgttatctggctggaaaaatggctgaagagctatcagggcacgctgatcctgatctctcacgaccgcgacttcctcgatccgatcgtcgataaaattattcatatcgaacaacaaagcatgttcgagtacaccggcaactacagtagctttgaagtacagcgcgccacccgtctggcgcagcaacaagcgatgtacgaaagccagcaggaacgcgtagcgcatctgcaaagttatatcgaccgtttccgtgccaaagccaccaaagcgaagcaggcccagagccgcattaagatgctcgagcgtatggagctaattgcccccgcgcacgtcgacaacccgttccgctttagcttccgcgcgccggaaagcctgccaaatccgttactgaagatggaaaaagtcagcgcgggctatggcgatcgcattattctcgacagcattaaactgaacctggtgcccggcagccgtattggtctgttaggccgcaatggcgcgggtaaaagcacattaatcaaactgttagccggtgaacttgcgccagtcagcggtgaaattggtctggcgaaagggatcaaactcggctacttcgcccagcatcaacttgaatacctgcgcgccgacgaaagtcctattcaacatctggcacgtttagcgccgcaggagctggaacaaaaactgcgtgactacctcggcggctttggtttccagggcgataaagtaaccgaagaaacgcgccgcttctccggtggggaaaaagcccgcctggtgctggcattaattgtctggcagcggccgaatctgctgctgctcgacgaaccgactaaccaccttgacctcgacatgcgtcaggcactcaccgaagcattaatcgagtttgaaggcgcgctggttgtcgttagccacgaccgtcatttgctgcgttccaccactgacgatctctacctggttcacgatcgtaaagtcgaaccgttcgacggcgatctggaagattatcaacagtggttgagcgacgtacaaaagcaggaaaaccagaccgacgaagcgccaaaagagaatgcgaacagcgcccaggcacgtaaagatcagaagcgtcgggaagctgagctgcgtgcgcaaacccagccactgcgtaaagagattgcccgtctggaaaaagagatggagaagctgaacgcgcaactggcgcaggcggaagagaaactcggcgacagcgaactgtatgaccagagccgtaaagcggagttgaccgcctgcctgcaacagcaagccagcgccaaatccggcctggaagagtgcgaaatggcatggctggaagcccaggagcagcttgagcagatgctgctggaaggccaaagcaactgatggcgcagataacgacgaccgatgccaatgaattcagcagcagtgctgaattcatccccatgcgcggctttagcaattgtcatctgcaaaccatgctgccgcgtctgtttcgtcgtcaggtgaaattcaccccgtactggcagcggctggagttgcccgacggcgattttgtcgatcttgcgtggagtgaaaaccctgcacaggcgcaacataaacctcgtctggtggtgtttcacgggctggaaggcagtctcaacagcccttacgcccacggtctggttgaggcggcgcaaaagcgcggctggctgggcgtggtgatgcattttcgcggatgcagcggtgaaccaaaccgtatgcaccgcatttaccatagcggcgaaaccgaagacgccagttggtttttacgctggctgcaacgcgaatttggtcatgcgccaacggctgccgtcggctatagcctcggcggtaatatgctggcctgtttgctggcaaaggaaggcaatgatctcccggttgatgcggcggtgattgtctctgcgccgtttatgctggaagcctgtagctatcatatggaaaagggcttttcccgcgtttatcagcgttacttgctgaacctgttaaaagccaatgccgcgcgcaagctggcagcctaccccggaacgctgccgattaatctcgcgcagttaaaaagcgtacgtcgcatccgtgaatttgacgatctcatcaccgccagaattcacggctacgccgacgctatcgactattatcgtcagtgtagcgccatgccgatgctgaaccggatcgccaaaccgacgctgattattcacgccaaagacgatccgtttatggatcatcaggtgatcccgaaaccggaaagtctccccccgcaggtggagtatcaactgactgaacatggcggtcatgttggctttattggcggtacattacttcatccgcaaatgtggctggagagtcgcattcctgactggttaacaacgtatctggaggcgaaaagttgttgatattaacgtatctggaggcgaaatcatgttgattccgtggcaagacctctcccccgaaacgctggaaaatttaattgaaagctttgtgttacgtgaaggcaccgattatggtgaacatgagcgtacacttgaacagaaagtcgccgacgtcaaacgccagctacagtgcggagaagcggtgctggtatggagcgagctgcacgaaacggtcaatattatgccgcgcagtcagtttcgcgaataacctgcaaccgtcggcggacgagataataatgatagctaagtcatggagttactatgtctgccaaacatccggtcattgcggtaacaggatccagcggcgcggggaccaccaccaccagcctcgcgtttcgtaaaatattcgcgcagttaaatctgcatgcagctgaggtggaaggcgacagttttcaccgttacacccgcccggaaatggacatggcgatccgcaaagcgcgcgacgccgggcggcatatcagctacttcggccccgaggctaacgacttcggcctgctggaacaaaccttcattgaatacggtcagagcggcaaagggaaatctcgcaaatatctgcatacctacgacgaagccgtaccgtggaatcaggtaccggggacattcaccccctggcaacctttaccggaacccactgatgtactgttttatgaaggtttacacggcggcgtagtcacgccacagcataacgttgcgcagcatgtggacttactggtcggcgtggtgcctatcgttaaccttgagtggattcaaaaactgatccgcgacaccagcgagcgcgggcacagtcgagaagcagtgatggacagtgtagtgcgtagtatggaagactatatcaactacatcacaccgcagttttcccgcacccatcttaacttccagcgcgttcccaccgtcgacactagtaacccgttcgcggcaaaaggtatcccgagcctcgatgaaagctttgtggtgatccattttcgtaatctggaagggatcgatttcccctggctgctggcgatgttgcaaggcagtttcatttcccacatcaatacgttagtggtaccgggcggcaaaatgggtctggcaatggaattaattatgctgccgctggtgcaacgattgatggaaggaaagaaaatcgagtaactctgctattacgccggataaaatactatccggcttcacaacgggatagttaagtcacgcggcaaccacttcatagctgtgagtaatattcaccgctttttccagcatcaacgccacactacaatatttctcggcagagagatcaaccgcacgcgcaaccgctgcgtctttcaggtcgcgaccggtgacgataaaatgcagattaatgtgcgtaaacaggcgtggtgcctcttcgcggcgttcagaggtcaattttacttcacaatcgaccacatcctgacgccctttttgcaggatgctaaccacatcgatggcactgcaaccacccgccgccatcaacaccatttccatcggacttggtgctttatcgccactgttgccgtccattaaaatctgatgaccagaggcggattcgcccagaaaagttaacccttcgacccacttcactcgcgcttgcatttttgctactccactgcgtcaattttcctgacagagtacgcgtactaaccaaatcgcgcaacggaaggcgacctgggtcatgctgaagcgagacaccaggagacacaaagcgaaagctatgctaaaacagtcaggatgctacagtaatacattgatgtactgcatgtatgcaaaggacgtcacattaccgtgcagtacagttgatagccccttcccaggtagcgggaagcatatttcggcaatccagagacagcggcgttatctggctctggagaaagcttataacagaggataaccgcgcatggtgcttggcaaaccgcaaacagacccgactctcgaatggttcttgtctcattgccacattcataagtacccatccaagagcacgcttattcaccagggtgaaaaagcggaaacgctgtactacatcgttaaaggctctgtggcagtgctgatcaaagacgaagagggtaaagaaatgatcctctcctatctgaatcagggtgattttattggcgaactgggcctgtttgaagagggccaggaacgtagcgcatgggtacgtgcgaaaaccgcctgtgaagtggctgaaattagctacaaaaaatttcgccaattgattcaggtaaacccggacattctgatgcgtttgtctgcacagatggcgcgtcgtctgcaagtcactagtgagaaagtgggcaacctggcgttcctcgacgtgacgggccgcattgcacagactctgctgaatctggcaaaacaaccagacgctatgactcacccggacggtatgcaaatcaaaattacccgtcaggaaattggtcagattgtcggctgttctcgtgaaaccgtgggacgcattctgaagatgctggaagatcagaacctgatctccgcacacggtaaaaccatcgtcgtttacggcactcgttaatcccgtcggagtggcgcgttacctggtagcgcgccattttgtttcccccgatgtggcgcagactgatttatcaccccgatatcaactatgcacttcgacaaacgctggtgctatgtttgcccgtggccgttgggttaatgcttggcgaattacgattcggtctgctcttctccctcgttcctgcctgttgcaatattgcgggccttgatacgcctcataaacgttttttcaaacgcttaatcattggtgcgagcctgtttgccacctgtagcttgctgacacagctactactggcaaaagatgttcccctgccctttttgctgaccggattaacgctggtacttggcgtcactgctgagctggggccattgcacgcaaaattgcttcctgcaagcctgctcgccgccatttttaccctcagtttggcgggatacatgccggtctgggaaccgttgctcatctatgcgttgggcactctctggtacggattgtttaactggttttggttctggatctggcgcgaacaaccgctgcgcgagagtctaagtctgctgtaccgtgaactggcagattattgtgaagccaaatacagcctgcttacccagcacaccgaccctgaaaaagcgctgccgccgctgctggtgcgccagcaaaaagcggtcgatctaattacccagtgctatcagcaaatgcatatgctttccgcgcaaaataatactgactacaagcggatgctgcgtattttccaggaggcgctggatttacaggaacatattagcgtcagtttgcatcagccggaagaggtgcaaaagctggtcgagcgtagccatgcggaagaagttatccgctggaatgcgcaaaccgtcgccgctcgcctgcgcgtgctggctgatgacattctttaccatcgcctgccaacgcgttttacgatggaaaagcaaattggcgcactggaaaaaatcgcccgccagcatccggataatccggttgggcaattctgctactggcatttcagccgcatcgcccgcgtgctgcgcacccaaaaaccgctctatgcccgtgacttactggccgataaacagcggcgaatgccattacttccggcgctgaaaagttatctgagtctaaagtctccggcgctacgcaatgccggacgactcagtgtgatgttaagcgttgccagcctgatgggcaccgcgctgcatctgccgaagagctactggatcctgatgacggtattgctggtgacacaaaatggctatggcgcaacccgtctgaggattgtgaatcgctccgtgggaaccgtggtcgggttaatcattgcgggcgtggcgctgcactttaaaattcccgaaggttacaccctgacgttgatgctgattaccaccctcgccagctacctgatattgcgcaaaaactacggctgggcgacggtcggttttactattaccgcagtgtataccctgcaactattgtggttgaacggcgagcaatacatccttccgcgtcttatcgataccattattggttgtttaattgctttcggcggtactgtctggctgtggccgcagtggcagagcgggttattgcgtaaaaacgcccatgatgctttagaagcctatcaggaagcgattcgcttgattcttagcgaggatccgcaacctacgccactggcctggcagcgaatgcgggtaaatcaggcacataacactctgtataacagtttgaatcaggcgatgcaggaaccggcgtttaacagccattatctggcagatatgaaactgtgggtaacgcacagccagtttattgttgagcatattaatgccatgaccacgctggcgcgggaacaccgggcattgccacctgaactggcacaagagtatttacagtcttgtgaaatcgccattcagcgttgtcagcagcgactggagtatgacgaaccgggtagttctggcgatgccaatatcatggatgcgccggagatgcagccgcacgaaggcgcggcaggtacgctggagcagcatttacagcgggttattggtcatctgaacaccatgcacaccattagcagcatggcatggcgtcagcgaccgcatcacgggatttggctgagtcgcaagttgcgggatagcaaggcgtaatgcaggctaaaccatcggataaggcattcacgccgcatccgacatcttttgcctgatgcttcgtatttacgccccaaccaccttcgccaccgcgtgggcgaaacgttgcatcccttcatcgatatccgcatcttccaccaccaggctcggtgcaaaacgcatcacatccggtccggcattcagcaccattacgccagcctctgcgcccgcatacaggaaatcacgcgcccgacctttgtactgtggtttcagctctgcgccaatcaacagccccataccgcgaatatcgctaaatacatcgtactgctgatcgatcttctgcagatggtcaacaaaacgctggcgtttcgcctgaatgccttccagcacttcaggggtattgatgatatcaaacgccgcccccgctactgcacaggccagaggattaccgccgtaggtggaaccgtgagaaccaggatgaaacgcagaagcaatttccgccgtggtcagcatggcgctaatcgggaagccgccgcctaacgctttcgcagaggtcagaatatccggcgtaacgccgtagtgcatgtaagcaaacaaatcgccggtccgccccatcccgcactgcacttcatcaaacaccaataatgcctgatgttgatcgcacagctcgcgcaagccctgcaaaaactctggcgtcgctgccgtcacaccgccctcgccctggatcggctcaaccaccaccgcacaggtgtgatcatccatcaccgctttcactgcatggagatcgttaaagggaacgtggatgatgtctgccggtttcggcccaaagccgtcggaatattttggctgcccacccacgctaacggtaaacaggctgcgaccatgaaaagcgttatggaaggcaataattttggttttgaacgggctatgacgcacacaggcgtaatggcgtgccagtttaaaggcggtttcgttagcttccgtgccggagttcataaacaccacgcgttcggcaaacgttgcctcaatcagtttacgcccaagacgcagcgccggttcattggtgaaaacgttactgatatgccacagagtttcgccctgggtttttaacgcgttcaccagcgcaggatggcaatggcccaacgccgtaactgcaatgccacccgcgaaatcgacatactccttgccttgctgatcccagattcggctgccctgaccttttaccggaataaactctgccggagcataaatcggcaggatcacttcatcgaaagtcgcgcgtgtaattgctgtttgttcaattgccatctcatgatcaccctgttacgcataaacaaatgtgaaattataaccacaaaatatgcataaaaaatcactaaatggcaatcagaaatcagcgatgcaggaaattagccagcagttgatgtccttgttcgctaagaatactttctggatggaactgcacaccttccagatcccactggcgatggcgaatccccataatctctcgggtttcgctccaggccgtcacgtcaaagcacgctggtaaactgtcaggttccaccaccaggctatggtagcgtgtcacggtaagtggatttgccagcccccgaaatacgccctcaccgttatgtgtaatcgggctggttttgccgtgcatgacctttgcggcgcgcacaactttaccgccaaatgcctgcgccattgcctgatgaccgaggcagacgccaagaatcggcaagcgcccggcatagtggcgaataacgtcaagggagatcccggcttcatctggcgtacaggggccaggactgatgacaattttttgtggtttaagggcgtcgatatccgccagcgtcaacgcatcgttgcgcttaaccagcacatccgcccccagttcacaaaagtactggtagaggttccaggtaaaagaatcgtagttatctataagcaggatcatggcggctccggtacaaaagaaccgcgctattttactcagattccccggcttcgcttaccactttgctaaatatcatctgcagtgcggtgagatcccccattgccccactctgatttgcctgattccaggcctctttttcgataccctgccagctcagttgatatccggcatgaatcgccagttgctcgaagaagatccgctgtgccagaccacttcccacccggaagggatgcagcacgttgatttcacaatagtaatgcgccagccgctcgacgaacttcgctttctccaggccaaccagataaccttcttcctccagatcctgcatcagggcattgccctctttttcgatataagcaaagtggcagaacggcgtatcaccctgataaatatcaacttcacgcagttgccctgcccagtcgaaaatatcctgatacagctggcgatggatagttcgcaaatgcggtaaaccgcgcaccagcggaccaagctcaatggtcgcagcacgcagcgccgtcatttcgtaagcggcctgttccagccgctgctgctggcggatgttcagccggttacgcatgatatcaaggcctggataaagatacggatcgcgcccttcgccgaatttatcgctcatagtgactcctcagctcttcaaggcgcgctaaagcctctgcggcagtaagagtgactaaaggcatctcgacgccttcaagacggcgactggcctgaaaattacgattacgctgaagctcccagagacgggacttttgcttatcggtgagtttcttcacttgatgcctccctgaacgtgtccatttgccacaagtataagcggcaaatccgggttacgccgggagagcagaagcgcgggcaagattgcccgcgcgagaaatcattacggcaggactttagcggaaaggataactaccggtttactcggcacattctggtacggaccaacgtcatgagtcggcacctgggaaatcttatcggcaacgtccatgcctttcaccactttaccaaataccgcgtaaccgaaatcacgctgaccatggtcaaggaaggcgttatcggcaacgttgataaagaactggctggtggcgctgtctttgtcagcggtacgtgccatcgcgatggtgccacgcgtgttgcgcaggccgttatcggcttcatttttgattggcgggtttggttttttctgctgcatctgctcggtgaaaccgccgccctgaatcataaagccaggaatgacgcggtgaaaggtagtgttgttataaaaaccgctgttcacataatcgacaaagttttgcacagacactggcgctttttgtttatccagctccagttcgatgttaccagcactggttgtcaacaatacgtgcgggtcccctttcgctgccattgctgcgggagaaagagcagaaagagcgaaaacagcagccatcgccgccagggtgcttttgaacatgagatttccttaacaaacagagcagaaaaaaagcaagtgaagagattctaaatagccttcaagaacaaggccatccctttacctaattttacgtatctgaaatatatgtaacctgacgatcactttttattccgtgatcaaaatcacctcttaaaatgcaatttagcaaccgattgcaataaaacatttaaacagatcacaaaatcacctaaaatcgcccgctcgcggcatatcccgctatgccattttatttttgaacgcaggccaatcatgactaacagcaatcgcatcaagctcacatggattagctttctctcctacgcactgactggtgcgttggttattgtcaccgggatggtgatgggaaatatcgccgattatttcaatctgcctgtttccagtatgagtaataccttcaccttcctcaacgccggcattttaatctctatcttcctcaacgcctggctgatggaaatcgtcccgttgaaaacgcagttacgttttggctttctcctgatggtgctggcggttgccggtttgatgttcagccacagcctggcgctgttcagcgcggcgatgttcattctcggggtggtcagcggcatcaccatgagcattggtacattcctggtaacacaaatgtatgaagggcgtcagcgcggttcccgcctgttatttaccgactccttcttcagtatggctgggatgattttcccaatgatcgccgcgtttctactggcgcgcagcattgagtggtactgggtttatgcctgcatcgggctggtgtatgtcgctatttttattctgaccttcggctgtgagttcccggcgctgggcaaacatgcgccaaaaacggatgctccggtagagaaagaaaagtgggggatcggcgtactgtttctctctgttgcggcgttgtgctacatcctcggtcagttaggttttatctcctgggtgcctgagtatgccaaaggcctgggcatgagcctgaacgacgcgggcacgctggtgagtaacttctggatgagttacatggtcggcatgtgggcgttcagctttattcttcgcttctttgatttgcaacgcattctgaccgtactggctggtctggctgcgattctgatgtacgtctttaacaccggaacaccagcacatatggcgtggagtattctcgctctgggcttcttctccagcgcgatctataccaccatcatcaccctgggtagtcagcagaccaaagtaccgagcccaaaactggttaactttgtcctgacctgcggaaccatcggtactatgttgacctttgtggttaccggcccgatcgttgaacatagcggtccgcaggcggcactgcttacagcaaacggtctgtacgctgtcgtctttgtgatgtgcttcctgttaggtttcgtcagccgtcaccgtcagcataacaccctgacctctcattaattgctcatgccggacggcactatcgtcgtccggccttttcctctcttcccccgctacgtgcatctatttctataaacccgctcattttgtctattttttgcacaaacatgaaatatcagacaattccgtgacttaagaaaatttatacaaatcagcaatatacccattaaggagtatataaaggtgaatttgatttacatcaataagcggggttgctgaatcgttaaggtaggcggtaatagaaaagaaatcgaggcaaaaatgagcaaagtcagactcgcaattatcggtaacggtatggtcggccatcgctttatcgaagatcttcttgataaatctgatgcggccaactttgatattaccgttttctgtgaagaaccgcgcatcgcttatgaccgcgtacacctcagctcttacttctctcaccacaccgccgaagagctgagcctggtgcgcgaaggcttctacgagaaacacggcatcaaagttctggtcggcgaacgcgctatcaccatcaaccgtcaggagaaggtgattcactccagcgccggacgtaccgttttttatgacaagctgatcatggcaaccggttcctacccgtggatcccgccaatcaaaggttctgatactcaggactgctttgtctatcgcactattgaagacctcaacgccattgaatcctgcgcccgtcgcagcaaacgcggtgccgttgttggtggcggcctgttaggtctggaagccgcaggcgcgctgaaaaacttaggtattgaaacccacgttatcgaatttgcccctatgctgatggcagaacagcttgatcagatgggcggcgagcagctgcgtcgcaaaatcgaaagtatgggcgtgcgcgttcacaccagcaaaaacacccttgagattgtgcaggaaggtgttgaagcgcgtaaaaccatgcgttttgccgacggcagcgaactggaagtcgactttatcgtcttctctaccggtatccgtccgcgcgataagctggcaacccagtgtggtctggacgttgctccgcgtgggggtattgtcattaatgattcctgccagacttccgatccggatatctacgccatcggtgaatgcgcaagctggaacaaccgtgtatttggtctggtagcacctggctacaaaatggcgcaggtcgccgttgaccatattctcggtagcgaaaacgcctttgaaggtgctgaccttagcgccaagctgaaactgctgggcgtagacgtaggcggtattggtgatgcgcacggtcgcacgcctggcgcacgtagctacgtttacctcgacgaaagtaaagagatctacaaacgcctgattgtcagcgaagacaacaaaaccctgctcggtgcggtactggtgggcgataccagcgactacggtaacctgctgcaactggtgctgaacgctatcgaactgccggaaaacccggattccctgatcctgccagcacacagcggtagcggcaagccgtctatcggtgttgataaactgccggacagcgcgcaaatctgctcctgcttcgacgtcaccaaaggtgatctgattgctgccatcaacaaaggctgccacacagttgcggcgctgaaagctgaaaccaaagcgggtactggctgcggtggctgtatcccgctggtcactcaggtactgaacgcggaactggcgaaacagggcatcgaagttaacaacaacctgtgcgaacactttgcttatagccgtcaggaactgttccatttgatccgcgttgaaggcattaaaaccttcgaagaactgctggcgaaacacggcaaaggctacggttgtgaagtttgtaaaccaaccgtcggtagcctgctggcctcctgctggaacgaatacattctgaagccggaacatactccgctgcaggattctaacgacaacttcctcgctaacatccagaaagacggcacctacagcgtgatcccgcgttctccgggcggtgaaatcaccccggaagggctgatggcggtaggtcgtatcgcgcgtgaatttaatctctacaccaagatcactggctcccagcgtctggcgatgtttggcgcacagaaagacgatctgccggagatctggcgtcagctgattgaagccggcttcgaaaccggtcatgcctatgcgaaagcactgcgtatggcgaaaacctgcgtgggtagcacctggtgccgctacggcgttggcgacagcgtcggcctcggcgtggaactggaaaaccgctacaaaggcatccgtacgccgcacaaaatgaagttcggtgtctccggctgtacccgtgaatgtagtgaagctcagggtaaagacgtgggtattatcgccactgaaaaaggctggaacctgtatgtttgcggtaacggcggcatgaaaccgcgtcatgcggatctgctggcggcggatatcgatcgcgaaacgctgatcaaatatctcgaccgcttcatgatgttctacatccgtactgccgacaaactgacgcgtaccgcaccgtggttagaaaacctcgaaggcggcatcgattacctgaaagcagtgatcattgacgacaaactggggctgaacgcacatctggaagaagagatggcgcgcctgcgtgaagcggtactgtgtgagtggactgaaacggtcaatacgccgtctgcgcagactcgcttcaaacacttcatcaacagcgacaagcgtgacccgaacgtgcagatggtgccagagcgcgaacagcaccgtccggcaacgccgtatgaacgtatcccagtaactctggtggaggacaacgcatgagccagtggaaagacatctgcaaaatcgatgacatcctgcctgaaaccggcgtctgcgcgctgttaggtgacgagcaggtcgcgattttccgcccgtatcacagcgatcaggtgtttgcgatcagcaacatcgacccgttcttcgagtccagcgtgctgagtcgcggactgattgcggaacaccagggcgagctgtgggtcgccagcccgctgaaaaaacagcgttttcgcttaagcgacggcttgtgcatggaagacgaacagttttccgtcaaacattacgaagcgcgagtgaaagacggcgtggtgcagctgcgcggttaatgttttaacgggaggcgcaatgcctcccctttttgcatggtcctgtaataatcttcggtatattgcaggacattttttaaactttttgttttattttttgtttttattttttaaaggataatcaaatgtttacagacactattaataagtgtgcggctaacgctgcgcgcattgcacgcctgagcgcaaataacccgctcggcttttgggtcagctccgccatggcgggcgcgtatgtgggtcttgggatcatcctgattttcacgctcggtaatttgctcgatccatccgtacgccctttggtgatgggcgcgacctttggtatcgccttaacgctggtgattatcgccggttctgaactgttcaccggacacaccatgttcctcacctttggggtaaaagcgggcagcatcagccacgggcaaatgtgggcaatcctgccgcaaacctggctgggtaacctggtcggttccgtcttcgttgccatgctctatagctggggcggcggtagcctgctgccggtagataccagcatcgttcactccgtcgcgctggctaaaaccactgcaccggcaatggtactcttcttcaaaggtgcattgtgtaactggctggtttgcctggcaatctggatggcgctgcgcactgaaggggcggcgaaatttatcgctatctggtggtgtctgctggcatttatcgcgtccggctacgagcactctatcgctaacatgacgctgttcgcgctctcctggttcggcaaccacagcgaagcctacacgctggcgggtattggtcataacctgctgtgggtgacgctgggtaatactttaagtggtgccgtattcatgggattgggttattggtatgctacgccgaaagcgaatcgtccggttgcggacaaatttaatcaaactgaaacggctgccggttaattactaaggggtttttacgtggatcatttgcctatattttgccaattacgcgatcgcgactgtctgattgtcggcggtggtgatgtcgcggaacgcaaagcaaggttgctgttagacgcaggcgctcgcttaacggtgaatgcattagcgtttattccacagttcaccgcatgggcagatgcaggcatgttaaccctcgtcgaagggccatttgatgaaagccttctcgacacctgctggctggcgattgcagcgacggatgatgacgcgcttaaccagcgcgtcagcgaagccgctgaagctcgtcgcatcttctgtaacgtggtcgatgcgccgaaagccgccagctttattatgccgagcattattgaccgcagtccgctcatggtagcggtctcctctggcggcacctctccggttctggcacgcctgttgcgcgaaaaacttgaaagtctgctgccgttacatctgggccaggtagcgaaatacgccgggcaattacgcgggcgagtgaaacaacagttcgccacgatgggtgagcgtcgccgtttctgggagaaattgttcgttaacgaccgcctggcgcagagcctggcaaacaacgatcagaaagccattactgaaacgaccgaacagttaatcaacgaaccgctcgaccatcgcggtgaagtggtgctggttggtgcaggtccgggcgatgccgggctgctgacactgaaaggactgcaacaaattcagcaggcagatgtggtggtctacgaccgtctggtttctgacgatattatgaatctggtacgccgcgatgcggaccgtgttttcgtcggcaaacgcgcgggataccactgcgtaccccaggaagagattaaccagatcctgctgcgggaagcgcaaaaaggcaaacgcgtggtgcggctgaaaggtggcgatccgtttatttttggccgtggtggcgaagagctggaaacactgtgcaacgcgggtattccgttcagcgtggttccgggtattaccgcagcttctggttgctctgcctatagcggtattccactcacgcatcgcgattatgcccagagcgtacgcttaattaccggacacttaaaaaccggtggcgagctggactgggaaaacctggcggcagaaaaacagacgctggtgttctatatggggttgaatcaggccgcgactattcagcaaaagctgattgaacacggaatgccaggcgaaatgccggtggcaattgtcgaaaacggtacggcagtcacgcagcgcgtgattgacggtacgctcacacagctgggagaactggcgcagcaaatgaacagtccaagcctaattattattggtcgggttgttggcctgcgcgataaactgaactggttctccaaccattaatttaacccgggccagagaattctggccttcttaatgactctttttatatattcagcaaataaaacatagccccttaataaatattatctgctaatgggttatattcaccgttacagcgacttacaaaattaagtcattcgctcactgacgccaattaaatattcctgtatcgttcttaacgagcagtctgcttatattcatataatcaatgaatattaattaatatataatacatagggaatgtaaatgaacaaatttattaaagttgcactggtaggtgcagtactggctacgttaactgcatgtactggtcatattgaaaaccgtgataagaactgctcttacgactacctgctgcacccggcaatttctatttctaaaatcattggcggttgcggtcctactgcacagtaagtctctgacagaaatcggctaacaccggtttaattgcccgacgccctctggattttccgagggcgtatttgtttctatgtccttcttgcccccgcccgtaaaaatattttcactttaaattcaatttgataactacatccattagccacagcgcgatcctgtgcgaaattttgtgatcttcctccacattacataacatcatatgttgttatattcatcatgcattgtcatgttaccttttaaatgactgcaaactctcccctacaacgtattggacaagaaaaaggtatcgctatgggaagccaggaactccaacgcaagctcggattttgggccgttcttgcaatcgccgtcgggacaaccgtcggctccggtatttttgtatctgtgggtgaagtggcaaaagcagcgggcacgccgtggcttacggtgctcgcgtttgtcattggcgggttaattgtgatcccgcaaatgtgcgtctatgcggaactatccaccgcttatccggaaaatggcgcagattatgtttatctgaaaaatgccggaagccgaccgctggctttcctctccggctgggccagcttctgggccaacgatgcgccgagtttgagcattatggcgctggcgattgtcagcaatcttggctttttaacgcctatcgatccgttgctcggtaaatttatcgccgccggattaattatcgcctttatgttgctacacctgcgctccgttgaaggcggcgcagcgtttcagacgctaattaccatcgccaaaattatcccgttcactatcgtcattggccttgggatcttctggtttaaagcggagaattttgccgcccctaccaccactgcgattggcgcaacgggcagctttatggcgctgctggcggggatctctgccaccagttggagctataccggcatggcctctatctgttatatgaccggcgaaattaaaaaccccggaaaaaccatgccacgagcgctgattggttcctgtctgctggttctggtgctctacaccctgctggcgctggtgatttccggcctgatgcccttcgacaaactcgccaattctgaaacgccgatttccgacgccctgacctggatccccgcactcggcagcaccgctgggatctttgttgccatcacggcgatgatcgtcattcttggtagcctttccagctgcgtgatgtaccagccgcggctggaatacgcgatggcgaaagacaacctgttctttaaatgcttcggccatgtgcatccgaaatacaacacgccggatgtctccatcatcctgcaaggggcgctggggatcttcttcatcttcgtttccgatctcaccagcctgctgggttatttcaccctggtgatgtgtttcaaaaataccctcaccttcggctccatcatctggtgtcgtaaacgcgacgattacaaaccgctgtggcgtactccggctttcgggctgatgaccaccctcgccattgcgagtagcctcattctggtcgccagtacctttgtctgggcaccgattcccggccttatctgcgccgtcatcgttattgctactggtctgcctgcttacgccttctgggcgaagcgtagccgccagctcaacgctttgagctaatgttatctggagaaaataaaatgttggatattgataaaagcaccgtggactttctggtcaccgaaaatatggttcaggaagtggaaaaagttctcagccatgacgttccgctggtgcacgccatcgtggaagagatggtgaagcgcgacattgatcgtatttatttcgttgcctgcggaagcccactcaacgcggcgcaaacggcgaaacatctggcggatcgcttttccgatcttcaggtctacgccatttccggctgggagttctgcgataacaccccgtatcgcctcgacgatcgttgcgcagtaattggcgtttctgactacggtaaaaccgaagaggtaatcaaagcgctggagctgggccgggcctgcggcgcactcactgcggcgttcaccaaacgcgcggatagcccgattaccagcgcggcggaatttagcattgattatcaggccgactgtatctgggaaattcacctgctgctctgctacagcgtggtgctggagatgatcacccgcctcgcgccgaacgcggaaatcggcaagatcaaaaacgatctcaagcagttgccgaatgcgctcggtcatctggtacgcacctgggaagaaaaaggccgccagcttggtgaactggccagccagtggccgatgatttataccgttgctgcgggtccgctgcgtccgctgggttacaaagaaggcattgtaacgctgatggaatttacctggacgcacggctgcgtgattgagagcggagagttccgccatggcccgctggagattgtcgaaccgggcgttccgttcctgttcctgctcggcaatgatgaaagtcgccacaccaccgaacgcgccattaactttgttaaacagcgtactgacaacgtgatcgtcatcgattacgccgaaattagccaagggctgcacccgtggctggcaccgttcctgatgttcgtgccaatggagtggctctgctactacctgtctatttacaaagatcacaacccggatgaacgccgctattacggtggtctggtggaatattaatccctctcccggcccggcaacgggccggatttacgcaaggagttacccgatgaaaacaggtatgtttacctgcggccaccagcggctgcctattgaacacgcatttcgtgatgcaagcgagctgggttacgacggcatcgaaatttggggcggtcgcccgcacgcgttcgcgccggacttaaaagcgggcggcatcaaacaaatcaaggcgctggcgcagacgtatcagatgccgattatcggctatacgccagaaaccaacggctatccgtataacatgatgctgggcgatgaacatatgcgtcgcgaaagcctcgacatgatcaagctggcgatggatatggcaaaagagatgaacgcgggttatacgctgatttccgcggcccacgcgggctatctcacgccacctaatgttatctggggacggctggcagagaacctaagcgaactgtgtgagtacgcggaaaacatcggcatggatctaatcctcgaaccgttaacgccgtatgaaagcaacgtcgtgtgtaatgctaatgatgtgcttcatgcgctggcgctggtgcctagcccgcgcctgttcagcatggtcgacatttgcgcgccgtatgtccaggcggaaccggtgatgagttatttcgacaaactgggcgataaattacgtcatctgcatattgtcgacagcgacggggccagcgacacgcattacattcctggagaaggcaaaatgccgctgcgggaactgatgcgcgatattattgagcggggctatgagggttactgtacggtggagctggtgacgatgtatatgaacgagcccagactctatgcccgccaggcgctggaacgctttcgcgcgctgctgccggaggatgagagatgaaaaccctggcgacaatcggcgataactgcgtcgatatctacccgcaactgaataaagcgttttctggcggtaatgcggtcaatgtggcggtgtactgcactcgctacggcatacagccgggatgcattacctgggtgggtgacgatgactacggcacaaagctgaagcaggatctcgcccgcatgggcgtcgatatcagccatgtccatacgaaacacggcgttaccgcacaaactcaggtggaactgcacgacaatgatcgcgtttttggcgactacaccgaaggcgtgatggccgactttgccctgagtgaagaggattacgcctggctggcgcagtatgacattgtgcacgcggcaatctggggacatgcggaagacgcattcccacagctgcacgctgcgggcaaacttaccgctttcgacttctccgacaagtgggacagcccgctctggcagacactggtgccgcatctcgattttgcctttgcctccgcaccgcaagaagacgaaacgctgcgtctgaagatgaaagcgattgttgcccgtggcgcaggaacagtgattgtcacgctgggtgaaaacggcagcattgcctgggatggcgcgcagttctggcgtcaggctcctgaaccggtgacggttatcgacaccatgggtgccggagatagcttcattgccggattcctttgcggctggtctgcggggatgacattaccgcaggcgatagcgcagggaacggcgtgcgcggcgaaaaccattcagtaccacggtgcctggtaagtataacgttggcgtgagcatcttcacgccaacgtgctgttacttgccggaaaacgaccctataatccgagtaattcattctttatttcagggtcgattatgagtgctacggaccgctactctcatcaactcctctacgctaccgtccgccagcgactgctggatgatatcgcgcagggggtttaccaggccgggcaacagatccctaccgaaaacgagctttgtacacaatataacgtcagccgcattaccattcgcaaagccatcagcgacttagtggcagacggcgtactgatccgctggcagggaaaaggcacctttgtacaaagccagaaagttgaaaacgccctgcttactgtcagtggttttaccgattttggcgtcagtcaaggcaaggcgacgaaagagaaagtgatcgaacaggaacgggtcagcgccgcgccgttttgcgaaaagctgaacatccccggaaacagcgaagtgttccatctctgccgggtgatgtatctcgataaagagccgctgtttattgatagtagttggatcccgctgagccgttatcctgactttgatgagatttacgtcgaaggaagctccacctatcagttatttcaggagcgttttgacacgcgagtggtcagcgacaaaaagaccatcgatatctttgccgccacccgcccgcaggcaaaatggctgaaatgcgaactgggcgaaccgttgtttcgcatcagcaaaatcgcctttgatcagaatgacaaaccggtgcacgtctccgaactcttctgccgcgccaatcgcatcaccttaactattgataataaaagacattaaccgtaggccggataagatgcgccagcatcgcatccggcgatgctggcgcgttgaattttacatcccgtacgttcccctcaccctaaccctctccccaaaggggcgaggggaccgttcagtacggaatttagcttgacggtgctatccagcattaaatactggcaatactctcacgcaaaatccgcagcaccgtctcttcaccgctgcgattcgggttaatgcgaatcgcacaatgttcactttgtggattcgcctggcgaaacgttccggaaaggcgataaaagagcggcgggatttcatatttgctctctgcacccaccgggtaaggcaaggcaccgcgcttttgcgcctcttccagcactctggcggcaatcggctgatgaaactcgacaatcaacaccttgctctgcgcattagcaatcaccgcgcttttcacttccggcaccgcaccaccgttaagcaaagccagcaaccgttcagatacccctgcctgcaccgcgtgcatcactggcgcaaacaccagaccacgcaatacttccagcgcctgtgcgccctggatctggctaccgccggagtaaagcgtggcgcgaatacggttgataacatcagcatcgccgaccactgcaccaacaccctctggcccaaatagcttgaagcaggaaaatgtgctgacattcgcgccgcattcacagccgattcgagccaccttcatcaccgcatagttgtcatcggttaacgctggaacacctgccgcgcgcaacgttgccagcacatctgccagcacgtagctgtcctgcggctgctggcgcgtatgctgcaccagcgccgcatccggttgttgctcgtcgacgacctgcttcagtgcgctcaggtcattgaaatcaacagtaataagcgtcagccccatctgctcaataataacccgtgtcgtcgggtaaacaggcgcgtcatgcaccagaagacgctgccccggtttgagcaaagccgccagcccggcgcgaatcgcgccagtccccgcgtcctgcaccagcgccgcagcctgtgcgtgaaatgcatcagccagcacctgttccacacgctgggtaacgcgcggttgattcagtcctggcgttaagcctaaatcaccgccagtaagaaactcgctgccggggaaatggcgacaaatgctatccaccagcgcaaactgcttttgctgcgcctcaataatcgtcaggctttgcagaggaaacgtcttcataggtgccttccttaagccggaacgaacaggccaagccagtaaagaacattcagcagaataccggtgatcattactgccacgaccggtgccgccattttctgtaccggacggcccagggattcgttgaggaagtaaatggcaaccgcgatagagaatccggtataacccgccatcttaattgctgcgaaaatgctaccgaccagcagcgccacttccatcagcatattcatggcgttacggatgttatcgctcgcattacgcacgctcgggtagcgtcccagccatttgccgatgctacgaagcagcaagacttccgcgctaataaccactgcgcctaataccgctgcaaccatcggattcgggctgagatagtccaccgcataaacaaaggtaaagcccgcaactgcatacacacccgttgctaacgcggtggtggcaatcaacggcacaaaccccagtccgcgcataaattctgccagagccgcctgattaatcagcgtttggctttgttccggcgttacgcctgcggaatatgctttctccagtgtgaagatgctcacttcactgccagcaaaaatcttcatgctggcaacggcggcaatcaatgctcccacgatggcgatatagggtaagtttttgataatccgactcgtgcgttcttcaaacacgctaagcccgctggcatcaatgtcattttcatcacgatgacgcaggtcgtgagttatcgcgatccccagcagcatcaccatgccaataaagatttcgatggattcagggttaagatgtgggaaatagcgcacgactaccacacgggtcatcagtaccaccacggcggcgatcagactttgcttccagccaaactggtagaaaatcgccaccagcgggaacagtgcaaaagcactaaccaccgggctgcttaattcccccaggctacctaatacatccaccggcagcgcggtcagcagctggtttactggcaacaggcaagtaaggatcaacacgccccagatagcgccaagaccaaacgccatcaggctgtttatcgccaggacgccgaggatatcggtaggaagaaagagtaaccatgcgttgagcagcccggttttcagggtaaaagagatccccacgctggccacaaaaccaatgctcagaccaaaagcgatactccccgcctcgcgacggttcatatagccttcaatcagttgcggcaggatcgggcggatgccgtcatgaaaaacagccgcgctgcgatgcgccagaaggcttgtcatacccgtcaggcacgccaccacgataatctgaatatacagatccatagtcgtgccttttatttcagatggttaatcagcatcggaatcgcgtgttcgacgtgctcaacggaaaggccaaacgccacttttccttcagcgatcattttggcgatatgctcgtctttcgctttaatgcctggtttggcaatggtgcaacttttgttatagcctatcaccgcgatggcaatgctcaatgccgcgcccgcaccggtattacacgcgccgatgtaataatccagttgcccggatttcaccttcattgccgcttccatgtcgttgtgaatgaaaacttcaaaacagccaggagccgtcgcttcaatagtttttttaatctgctcacgctgtaagcctgcaacgccaatctttttcatgagtctgtccttattggaaaaattgagagggattttcacgtaacatcacatccacatcggcctgactgaatccactctggcgcaattgcggaataaaggtggttagtaaatagtcatagccataaccaccgttggcttttaaatgggagcggcgcgtaatatccatgctcagcatgacgcggttcagcaacccacggtcgcgtagcgcatgaagcatcgcaatacgcttttcgtccgggtagtaactgttcttgccgatggtgtcgaactgcacgtacgcgccgagatcgatcatcttcaaaatgttgtcgaggttgtctttcagatcgcagtgaccaacggtgacgcggctaagatcaaccccgtgggcttgtagcaacgccagttgctccagccccatcgtgctgaagctcgtatgcgtggagatcgggcgtccggtctggttatgcgccagcgcagcggcaataaataccttctcttccagcggcgtaatctttccttcgctggtgccgatctccgcgatgatcccggctttcagctccgtgccatcgataccctgttcaatttcatcgaccatctcctgcgccagttcctgcacgctgcgggtcgccacatgttccgggaaaaacgcgtcctggtaataaccggtacaggccaccacgttgatccccgtctcgcgcattacatcaagcataaattgcgcattgcgccccatgtaacggttggtcatctcaatcacattacgcacgccccgggtcatcaggtcgttcatctcctggcaaatgaacgcatactgatcaaggcggcagtccacgttgtttttaaagccggagagatcaatatgcagatgctcatgggcgagggtgtaacccgtcggatcaaaactcatagggtgtctcctgcaaaccggagggaggaaagaaaagagcgaccattttgtggcggtggcgcgcggaaaaattcacacacggtagcccccacatcagaaagcgtggtgcgcacaccgagctgcgtagcgatcatcccttgctgataaaccagcactggcaccacttcgcgggtatggtggctgtgaccaatggtcggatcgttgccgtgatccgccatcacgaccaggcaatcatctggctgcatcgcctcaacaagccgggcaaggttacggtcaacgacctgcaaacgttcggcataacgtgcgacgtcttctgcatgaccagcgaggtcggtttcctgaatgttggtgcaaataaacgccgtcggatgggtgttaaattcgttgagggtgatatccataatccgctggctatccaccagattttgccagctcacgccataaggattgttgacgatatctgccaccttacccaccagcacggttggcacgcctgcttcatacagtttttgtggcacctgcactttttcatcgacgccatagcccatatgcacgacctggaaaccgttgtcataagcgccagaacgcggcgcattgataccaataaagcgcccttctttgctttctgcggcatcgagaatgcgttgactgtcggttaacaggccaccaaatgtaatgacccgaccgacctgtacctgctcacgcacgatacgaccaattttgattgcgtcgtcaaaagagatcacagagagattggcggtaatgttatagacctggcctaaatccgcctcgagattatcgccaatcgcaaccgcctgattgacccacagaaattgcagatcatcgccacggcgctccacctgccagccagcggaaactaatgcctgctcaacacggtcaatcacatcgcgaaaaggcatccgcagcggcggtaacgggcgcgtgcctaaaatttcctgatgccccataaaggtatcgccaccttcatgttgcagctctgccacgccccaggttgcggaatcactcggctgcatatcgcctggcgcataacccaatgcgttgattagccccagcgtctccagcgttggtagctgcaaatgcggcaactggctcaggatgtgaccacatgtattcgctcccgcatcttgcggacgcaccagcgtgacatctttcattgcccctacgccaaagctatcaatcactaacaccacaaatcgcgccattacgcccccagagagtttccaagactgtcataacgaccgacgatttccggttcgccacgatgaataccggacaccagcaccacatcgctacgggtgacaaaaatctgcgtgcgaaaacagagcaccactgcactgcttaccggaaactcgcctgccagcggcagggtgtagtcgatactgctgtcatccacagttttgagattggtttcagtaatcttttgattttctggcgtaaacaccaacgcatgttgcgcatgaccacgacgatagtaaccgccgccgtagcagtagctgtcgccacggaaatgatgggagatttcacttaaccagagcatcgcgatacgttcaggctgatcgccctgctggtttgccggaatagtgcccgtcagcgcatgaccgggttcggcatgagtcacaccgtattgcgccagtaatggcaggctagtgcagctggtcgcactaggcgcgttcagttgctcaagtgcaataccagatttcgccagttgatcccgtgcctgtatcagcgtgtgaagattcggtgtcggcaaaacttttccgacagcctcatcccaaagcaggcaagggaaatgggtaagtccggctaaatgcagccctggcagattctggatttcggcgacaatctccggcaacaccttgagggcaaaaccgctctcctggcccggataaagaaaatcatcgtcgctataaactttaagcagcacagactggattcgcccggccttcaccgccgccgcagaaacttcccgcgctttgtcgagagtaaacacggtgatgacgtcggtgccctgttcaacggcgtcagcaacctgatgacaagggatttgtaccagatgcccctgatgcgccacaggcaaaccagcgcggcgcatgactcgcgcctctttgtaatccaccgccacaatgccgctgtagcctaatgccagcaatttttccgccagccacggattacgaccaaactgcttggtcatcagatacagttcaatgccgtaaagccgcgccgtctcaatcagccgcttaccgttttccagtatctgatccacgtcgatcacccagctgtccggggcgatcttgccctgctgccacaggcttagtgcggcggaaatcagcgccgggttctggcgtttcaatgcttctacaaacatcttgttgcctcgtttctgttccttgaattaaatattcatttttttgaatatttaggttgtgcgacgtggatttgtcgggagcttcaaacctcttcgttagcagccatccataatccataaaggttggccagcaaatagccttcttcacacgggttaacttccagtgcgaattccttcaacaacacctgatgcaattgcacaacggcttgccagtggctggattgcgccagttctgccagcaactcgttatccagcggctctatttcttcaccacggcgactgcgcatcagtgcactcgccatatgtgtcatcgccatcgttccttgctcactgcgcaccggcagatggcactctgtttccagtacgttgacgacctgcatcatgcctttgcagatgtccttatcaataacgcctgcctcgcaaagcaggttgagtctggtttccatatcagatgcctttcgtttaataactcggttcctgttccccactcactacccgttgttgatgggcgagcagggcgtgtttatctacaacggcacgcagcagttgttgcattgggtaatcatcgactcgcgtcaggaccacggcttcggtggcctgtaaaaatcgcggatcgtctgtgagcggcgtcgcctctaatcccagcatggtcagttcgttttccgccaccacgttccagatcaccgcatcgacatcgcctttaacaatgcgttgtaaactctcgtgataagagagatcgactcgttccacatcactaccgccaaaaaaaacatcggtcatgattttctgatccgcgctacggttatccagccccacgcgcttcacgtttgcggactcgcctttacggcaaatcaactggtgctcgccaacgtaggtgtgcggccccaactccagcgcgaggcataagcctttttgcgtgagataactttccgccgctagtcggctaaccaccgccatgtcatacacgccattaagcagacactccacgcgaatatccgcgccacgcatgtgcgcatagtaaaaaggaatgccatcaaactgggctttcaatccgctcgccaggccttcgtacaaacgggtatagggcaagggcattgcacataccacgttgttgatatccacatgagtcagcaatgctttgttatccatctcgaccagataactgccattgcgcccacggcgttcaatccgtatcgctccgctactttccagcgttttcaacgcggcctgcgtcaggccaacggaactacggcattcatttgccagctcatctatggttttcaatcgattaccgcacttttcacccaacaaataacgggccagcgtcgtgatgacgacgccttcttttttgataaacgttcgacgcataataaattttcagtaaattgaatatttatatcttcaggaatttgaagataaggcgcaacagcgagatgtggaaacggcgaggcacttcacattttttcggattattgcaaatgaggataaaaaaaccgggtttccccggtttcagagtgatgataaaagcaaaattgcctgatgcgctacgcttatcaggcctacatttccttgcaatatgtgcattactttgtaggccggataaggcgttcacgccgcatccggcatgaacaaagcgcaatttgccagcaatagtgaattacggcttcgccacaaaaccaatcgcttcgtacaccgcttttagcgtacgggaagcgtgcgcgctggctttttccgcgccatctttcatcacctgttgcaggaaggcttcatcgttgcggaaacggtgatagcgttcctgcaattcagtcagcataccggaaacggcatcagccacttcacctttcagatgaccatacatcttgccttcgaactgtttttccagttctgggatgctctggcccgttaccgcactaaggatatccaacaggttggaaacgcccgctttgttctgcacatcgtagcgaactaccggcggctcgtcggagtcagtgaccgcacgtttgattttcttcactacgcttttcgggtcttccagcaggccgataacgttattgcgattatcgtcagacttggacatcttcttggtcggctccagcaggctcattacgcgcgcgccagatttcggaataaacggctccggcaccttaaagatctcgccatacagcgcgttgaaacgctgggcaatatcgcggctcagttcgaggtgctgtttctggtcttcacccaccggtaccagattagtttgatacagcaggatgtccgctgccatcagcaccggatagtcaaacagaccagcgttgatgttctcggcataacgcgcagatttatctttaaactgcgtcatgcgactcagttcgccgaagtaggtatagcagttcagtgcccagcctaactgtgcatgttccggcacgtgggactgaacaaaaatggtgcttttctcaggatcgataccacaagccagatacaaggccagcgtatccagcgtcgctttacgcagcttctgtgcatcctggcgcacggtgatcgcgtgttggtcaacgatacagtaaatgcaatggtagtcatcctgcatgtttacccactgacgcagcgcacccatgtagttaccaatggtcaattcaccactgggctgtgcgccactaaaaacgatgggcttagtcatttttgctttcctgattttcgctatgcggaagccctaatgcgggcagaaggtcatttatagactgataaattacatcaggctggctgagatcgatagcctcgccgtagttatatccgtaggttaagccaacacttgggcaacctgccgcttttgccgcctgaatatcattgcgactgtcgccgacaaacagcatctgttgtggggcaattcccatccgctcagccaccagtaacagcgggtccggatgcggttttttgttttgcacatcatcaccaccaatcaccacgctgaagtatttggcgatatctaaggcttcgagcagcggcgcgacgaacggcgtcggtttgttggtgaccaggcctagcggcaggcctttagcctgcaacgcgcccaacgtatcggcaacgtgcgggaacaaaaacgtcccctcttcggcaacctcgccatagtagcgatcgaacagtttacgcagaatacgtacctgttcttctgccggaatgtcgtcatcaacgggcggtttacccattgttttacgctgagtcgcacgttcctgacgcgcccaggtcaatgcgcgctccatcagaacatctgcgccgttaccaatccaggtaataacgcgttcttcacctgcgacgggcaactccagcgcatacagcgccatatctaccgcagcagcaagaccaggagcactgtcgaccagcgtaccatcaagatcaaaagcgacgccgcgaatatcttcaaacttattcatgacttacctttgccagttcactgcgcatttcatcaatgacttttttgtagtctggctggtcgaagattgcgctaccggcgacgaacatatccgcgcccgccgcagcgatttcgccaatgttgttcaccttcacgccaccgtccacttctagtcgaatgtcaaagccagactcgtcgatacggcgacgtacttcgcgcagtttatccagtgtttgaggaatgaaagactgaccgccgaaaccagggttgacggacatcagcaggatcacatccagcttatccatcacgtaatccagatagctcagaggtgtcgccgggttaaataccagacccgctttacagccattttctttaatcagttgcagcgtgcggtcaacatgctcggaggcttctggatgaaaggtaatgatgctggcaccagcggcagcgaaatcaggcacaatgcgatcgacgggtttcaccatcaggtgtacgtcgataggggcggtaatgccatagttacgcaaggatttcagcaccattggcccaatcgtcagattgggaacatagtggttatccatgacgtcaaaatgcacgacatcagcgccagctgccagggcttttgcggtatcttcacccaggcgggcaaaatcagcgctcagaatactgggggcaatcaaatactgtttcatccgcttctccttgagaattattttttcgcgggactaacgactcctggtttgtacaaagccagcagttcgtccacctttttacgtgtgccgccgttgctgcttatactgcgtcgaactttgacgacatgcaattttgcgcgctgataccactcacgcgttaacatcgtatcgtgattggagatcagcactggaatatggcgctcaaccagaccttcggcgatctccgccagatgcgcttgttgttcaagcgtaaaactgtttgtgtgatacgccgtaaagttggcggtcgcagacagcggtgcataaggcggatcgcaatagacgacggatgcatcatctgcgcgcgccatgctatcggcgtaagactcacaatagaaaaaggcattctgcgctttttcagcgaagtgatacaactctgcttccgggaaatagggttttttgtagcggccgaacggcacgttaaactcaccgcgcagattgtaacgacacaggccgttgtaaccgtagcggttcaaatataaaaacagtaccgcccgacggaacggatcctggcttttgttgaactcttcgcggaactgatagtaaacctcggcgcaatttgtttcgggaacaaacagctcgcgtgcggcctgtacgtactcatcagtacgcatcttcacaatgttatagagactgatcaggtcgctattgatatcggcaaggatataacgagaaaagtcggtgttgagaaacacgctcccggcacctacaaaaggctcaaccagacattcgcccttgggcaaatgccgtttaatatcatcaagcaggggatacttgccccctgcccacttcaaaaaagcgcgatttttcttcatgctgactaactaattacaccttctccggctgtggagaaagctccgacagcatccagcgcttcaggcaactcccgcaacgataaaccattgcgggagataaccttgattacttcagatcggcctgtacctgacgcagcggtttcgcccacgggtttttggcctggacatctgctggcaatgtagataccgcttttttcgcctcttctttgctagcgtacacgccagaaaccaggacataccacggctgaccattacgcgtcgtttcatagacaacgtagtttttcagattctctttcttcgcccaaccgttcaggttgtcgtagttagaggaactgctcagctgcagagtgtaatggctggacggtgcgcttttcaagctaccaacattacctgcggtcttcgccccagcagcgggtgttgctgtggtttgcgccggggatgccgtctgtactggagccgtagtcgccgtctcttttggtgctggcgtagaagtcgcagccggtgccttcgtgctcgccacaggggcagctggttcagtacgcttcggcgtctgtgctaccggcttcggctccgttttcacggttgcttgcggttttttcggttcaatcaccgcctgctgacgagctgggcgcgtagtggacggacgttcagcggtttgcgttttcgccgtgtcacggcttgcattgccattgcgaacaggcgcaaccgttgcgggttcagtcggcaacgtggaattgaccgccacattgttcagctgttgctgattttgtggctgggtcagcgcattgttcaggtcaccctgcacttcaacacgttgttgaccatccgttgccaccggggtttgcccttgagtcggcgtagaagagatcggtggcagagaaacatcctgctgagtattttccgcagacgtggttcccggcgctggctgcacgccattcgcctgatcggtcgcattgccagcaagatcaatactcttctcgccagacgcggtttgatcgctggaagtggtgctgggggcttttagcgcagaaccgataccgatgatcaacagcagtagaaccagaatgccgacgcccatcatcatatactgacgagaagcgggtttactggctgcttttttgcgcttacgcggacgacgctctacgcgctcttcatccacggtttcatcttcggattcgtcaatttcttcttcgatttccggttcctcattgcgctctttttgcgcacgagtcggacggcgatcgtcagtgtcatcaagttcaatatcatcaaaattgatctgcggttcgccacgttcagtacgctcagaacgttcagaagattgacgagaacgaccagtacgacgatcgctgggatcgggtttcagctcgtcttctggtttgaattcatccatttaacaccccactaaaaggttaatgcttaccacgttgcaattaacctgaagctaatagaccgcttgataagcggcctgacctttcttgttgttacgcactttgacaatcggcaatggcgttaagaacaagctcgtggctaacgccgctgcgaacttcactcttaccaattgccaacggaagaattaagcgcatctctcccgcaaggactttcttgtcacgcagcatatgcggtaaatacgcctgcgcggacatttcgcgcggcccattgaccggtaacccagcccgcttgagcagggttataatacgctgcgtttcggcagaactaaactgcccgagacgttcgctcgtccgcgccgccatcaccatacccgcagcgaccgcttcaccatgtaaccaattgccataccccatttcagcttcaatggcatgaccaaaggtgtgtcccagattcagtaaagcacgtaacccggtttcgcgctcgtcggcggcgacaacttctgccttcagttcacaacaacggcgaatacagtacgccattgccggaccgtccagacgcaacaacgcatccagattctcttccagccagttaaaaaacgcaccgtcaagaataatgccgtatttgatgacttctgccagcccgctcgctaactcacgcgggggaagcgttttcagacagtcgagatccaccaccacactagcaggttggtagaacgcgccaatcatgtttttaccgaggggatggttgaccgcagttttgccgccaacggaggaatcgacctggctcagtaacgtcgtcgggacttgaatgaaacggacaccgcgctgataactcgccgccgcgaagccggtcagatcgcccactacgccgccgccaagcgccaccagcgtagtatcgcgaccatgcggtttttgtaacaacgccgtaaagacggtatcgagtacagccaggcttttatactgctcgccgtcagggaggataacgctatcgacgttaacacccgcctgttcaagtacgccgcggaccttatcgagatacagaggagccagggtttcgttggtgaccaacatgacctgctcgccgcttttcagcggtaagaaactagctggttcattaaacaaaccagatgcgatggtaattgggtaactacgttccccgagagtaacgacaatcctctccataacgcgacatccaccttaattactgtacccgcagacgagtgtatataaagccagaattagttgctttccagcatgtgaataatctggtttgcaaccactttagcgctttgatcatcagtacgaatggtcacgtcggcaatctcttcatacagcggattgcgttcattggccaacgcttccagaacttcacgcggcggtgtttcaacgtgcagcaacgggcgttttttatcacgctgcgtgcgtgcaagttgcttttcgatggtcgtttcaagataaacgacaacgccacgagcggaaagacggttacgcgtttcacgggatttcacagagccgccgccagtagccagcacaataccctgtttctcggtcaactcattgatgaccttttcttcgcgatcgcggaagccttcttcgccttctaaatcgaaaacccagcccacatcagctccggttcgtttctcaatctcttgatcggaatcgtaaaattccatattgagttgttgagctaactggcgcccaatagtgctttttccggcacccataggcccaaccagaaagatattgcgtttctctgccattttttcggtactactaagactattcgttaatgataaacccgcttcgctcagagagcgccgcaggacatgaactgaaacctcataagatattgcgagagtcagactgaaaattatctcaatactccagcgggtttggcaactgaataaatcacccatccctctgcatatctggtcgctgcaagcgcgctgccttgctaccaccgctctggcgataaatcaccgggtaagattagcgtaaaaaagacagcaaaatgccgcctgaatgataaatcatcatcatggaacgcaggcagcgaagagcaccaactctcaaatcggtactccttgtatgctaaatacctgcgcgcgtcaaatagatgaaacacgttcagcgtaaaaacattaccgcttttacggctgtttactcactggaaaccagtcgtggcgtgataaacaccactaactcgcgtcgttcatcttcttttccgtcatgacgaaatgattgcccgaaccagggaatgtcgccaagcaacggtacgctatcctgaccgcttttatttttacgggtaaaaatgccgcccagcgccaacgtttctccgcttttgacctcgacctgcgtttcgatctcctgcttatcaatcgccagcacttcgccatcggcctgctgtagcacctgccccggaacgttctggctgatgtgtaatttcagccggatgcgacctttttgtaacaccgtgggcgtgacctccatccccaggacggcctctttaaattccacgctcgtcgcgccactttccccgctggaaacctgatatggaatttcgctcccctgtttaatgctggcaggctgaagatgactggccagcagacgcggactggcgataatatccagctgctgtttttgttcgagcgcggaaagctcaagatccagcaagcgtccgttgatgcgcccaatgttaaaaccgacatgcgttgtcgccgtcgctacggagaggtcgctaccaagcgtggtgacttgcccaacgccaccagcgtgttgcgcatcggccagcgtccatttcacgcctaactcacgcaaacttttttcattaatggtgacaatatgcgcgctcagctcaacctgcccgaccggcagatccatttgcgctacccactgttcaagcgcgcttaacgccgttttgttatctcgtagcaaaaggcgattggtgcgtttatcgacggtcatactccctttggcactcagtagcttctcccccgctttcgccagttctcccgcgtcggcgtattgcagggttatactgcgattttccagcggcagatttgcctgcgcccgcgcctgctccgcctcctggcgggcgatattgttattctgccaggcaatggaatgcacactgagaatgttgccttcctgccgcgttatcagtccggcgcttttcactacagtttgtagtgcctgcttccagggaacatctgttagatgtaagctcaccgtaccgctgacgtctgggctcacgaccaggttcaacttctcctgttcagccagcgcctgcaacacctgagctaccggaacgtcatccaccatcagcgtcactttttgcggctttgccgcctgtacgccgggtatcagcatcaacagtagtgcggctatccattgcttcatttgtatctccttgccgttgccacaaccattgtggcggttcgcagtttgtcccggtacccagcgttagtacgtctggcgtcagctgtaaaattgtccagccgttttccagcacatcgttttgctgcacccgtcgccatttcttttgcccgtcttttattacaccgatgatgcgctcgcctcgccctaccatcccctgatagcgccactggctaagttcgctaatccggcatagatcttccggcggtttaaaagggtcacgcataccggttaaaaggcacaatgcaatacctgccaacaaccagcgtttaaccctcatgcggcgtctccagttgtagcgtgaacaaaagatcatcaccttccacgcttaagctaaaacggctcacgctgacgttgcgctctgccagccgtgtaaatgcgctcggcactgcttcccacagcgttttcaacgccaactcgcctccctgcgcggatggatgccaggaaaccagttgcgcgccggataactgaaaatccagtgggctaaagggcagcgttttttcctcgctgaagggagcggtgtctaccaggcgatacagtgcggcccactgctggtgatgacttgcccgtagtcgaattaatgcgtcgcgctcttcatggtgtgtgctactcagaaaaatgagcgtaactaacatcagcaaccagaatgcccagcaaagctggcggaggcggggacttgtggcgaaccaccagtcaaagaacatgttcatcgctaaccttccttgttaactgatactcaaattgccagcgtccctgcgcatcctgctgcgtggctccccgctgattgagatgaaaagatgcatcctggcggagactcgtttctagtgcgtttaacgcggtaatgcttgttgtcagccccttgatctccagcgttccctgctgccagcttatcgttgtcagccaggcgtgctcgggtaaaagcgccgccagtgcttccagcgcagattgccagtcgcgggtaaattgtcgctggcgctgccgttggctacgctgttcgcgtaactgctgttgctccagcaaacgtggcttcgttatctgtaagctgcgggcgagttgttgttccgcctgaagcaaaactgcgtctatgcgcgcttcggcgctgcctgtcagacgcagtattagcgttatcccgacggccagcagcagaggcgcaacgaacatcagcaaccagaaacgcagaaaagcggtccggcgttgctgtcgccagggcaaaaaattaattggcgggttcatcagtacgccttcccaagcgccagccccagcgcgatggcaaagtctccacctggcggcggtagcggcggctgacgaacagaaacggcctcccagggatcaaatccgccttcgccacatatcgcgacgctttcgggatcaacggataacgctgccgccagctccttcgcgctagtcatccccaccgccagtttgcgcccccagctatagcgcgtcgcccacagccactgttcgttatcacgccaggccagacattgctgatgagaaggtaaaaaaggcaggaatcgctgtaatgcactggcatccggggtgatcgcgctcacatgaacacgcaacctttctgccagagtaagcagcgttgccagctctttgctttgcgcggcagtcacgttataggcgggactgagactgtcttcgctgtaatcgaagcgcagggagtccggatccatatccagctcgcgggccatcgtcccactcagccaggccgtttgctcccgctcaccaagggacatgctcgggcgcggaaaactccgctgtaatgtgcgactggcgggaaacgccaacataatgtgatgacgctgcggcagttcgcgactccacggtaacaacgttttagccagctgctgcgcatcaacaatccgcccatctttgataatgtcgttctccagcggcaaccgccaccagcgttgcaaaaagcattcttttgcgccccgcacgatcgcaaccgctaccgcttcttgctgttgtaaatgcaaaccaatttgccagatcttaaatgccattgtgatgatctccttatcacccgtcactctgacgggtatatcaatgcgtctggcttgcctttatactaccgcgcgtttgtttataaactgcccaaatgaaactaaatgggaaatttccagtgaagttcgtaaagtattttttgatccttgcagtctgttgcattctgctgggagcaggcagcatttatggcctataccgctacatcgagccacaactgccggatgtggcgacattaaaagatgttcgcctgcaaattccgatgcagatttacagcgccgatggcgagctgattgctcaatacggtgagaaacgtcgtattccggttacgttggatcaaatcccaccggagatggtgaaagcctttatcgcgacagaagacagccgcttctacgagcatcacggcgttgacccggtggggatcttccgtgcagcaagcgtggcgctgttctccggtcacgcgagtcaaggggcaagtaccattacccagcagctggcgagaaacttcttcctcagtccagaacgcacgctgatgcgtaagattaaggaagtcttcctcgcgattcgcattgaacagctgctgacgaaagacgagatcctcgagctttatctgaacaagatttaccttggttaccgcgcctatggtgtcggtgctgcggcacaagtctatttcggaaaaacggtcgaccaactgacgctgaacgaaatggcggtgatagccgggctgccgaaagcgccttccaccttcaacccgctctacagcatggatcgtgccgtcgcgcggcgtaacgtcgtgctgagccggatgctggatgaagggtatatcacccaacaacagttcgatcagacacgcactgaggcgattaacgctaactatcacgcgccggagattgctttctctgcgccgtacctgagcgaaatggtgcgccaggagatgtataaccgttatggcgaaagtgcctatgaagacggttatcgcatttacaccaccatcacccgcaaagtgcagcaggccgcgcagcaggcggtacgtaataacgtgctggactacgacatgcgccacggctatcgcggcccggcaaatgtgctgtggaaagtgggcgagagcgcgtgggataacaacaagattaccgatacgctgaaggcgctgccaacctatggtccgctgctgcctgccgcagtcaccagcgccaatcctcagcaagcgacggcgatgctggcggacgggagcaccgtcgcattgagtatggaaggcgttcgctgggcgcgtccttaccgtagcgatactcagcaaggaccgacgccgcgtaaagtgaccgatgttctgcaaacgggtcagcaaatctgggttcgtcaggttggcgatgcatggtggctggcacaagtgccggaagtgaacagcgcgctggtgagcatcaatccgcaaaacggtgccgttatggcgctggtcggtggctttgatttcaatcagagcaagtttaaccgcgccacccaggcactgcgtcaggtgggttccaacatcaaaccgttcctctacaccgcggcgatggataaaggtctgacgctggcaagtatgttgaacgatgtgccaatttctcgctgggatgcaagtgccggttctgactggcagccgaagaacagtccaccgcagtatgctggtccaattcgcttacgtcaggggctgggtcagagcaaaaacgtggtgatggtacgcgcaatgcgggcgatgggcgtcgactacgctgcagaatatctgcaacgcttcggcttcccggcacaaaacattgtccacaccgaaagcctggcgctgggtagtgcgtccttcaccccaatgcaggtggcgcgcggctacgcggtcatggcgaacggcggcttcctggtggacccgtggtttatcagcaaaattgaaaacgatcagggcggcgtgattttcgaagcgaaaccgaaagtagcctgcccggaatgcgatattccggtgatttacggtgatacgcagaaaagcaacgtgctggaaaataacgatgttgaagatgtcgctatctcccgcgagcagcagaatgtttctgtaccaatgccgcagctggagcaggcaaatcaggcgttagtggcgaagactggcgcgcaggagtacgcaccgcacgtcatcaacactccgctggcattcctgattaagagtgctttgaacaccaatatctttggtgagccaggctggcagggtactggctggcgtgcaggtcgtgatttgcagcgtcgcgatatcggcgggaaaaccgggaccactaacagtagcaaagatgcgtggttcagcggttacggtccgggcgttgtgaccagcgtctggattggctttgatgatcaccgtcgtaatctcggtcatacaacggcttccggagcgattaaagatcagatcagtggttacgaaggcggtgccaagagtgcccagcctgcatgggacgcttatatgaaagccgttcttgaaggtgtgccggagcagccgctgacgccgccaccgggtattgtgacggtgaatatcgatcgcagcaccgggcagttagctaatggtggcaacagccgcgaagagtatttcatcgaaggtacgcagccgacacaacaggcagtgcacgaggtgggaacgaccattatcgataatggcgaggcacaggaattgttctgattaaaaaggcgcttcggcgccttttcagtttgctgacaaagtgcacttgtttatgccggatacggcgtgaacgcgttatccggctaacaaaatcgtgaaaactcaataaattgcagaaaccccataagcctgataaacattgtgcatcaggcaaacttcacgcatttacactcgcccctgccctttcaaccattcgcgcacgaggaacagcgcactgacattgcgcgcttcattgaagtcagggtcttccagcaaatccatcatatgcgccagcggccagcgcacctgtggtagcggctctggctcatcgccttccagactttccgggtagagatcttgcgctaccacgatattcattttgctggaaaagtaagacggtgccatgctgagcttcttcaaaaaagtcagatcgttcgctccaaatccaacctcttcttttagctcgcggttagcggcttcgtagacgctttcacccggatcaattaatcctttgctaaaacctaattcgtaggattcagttcccactgcgtattcgcggatcaggatcaggtgatcgtccacaatcggcacaatcatcactgcttcccggttggttggacgcattcgttcataaacacgccgcacgccattgctgaactccagatccacgctctcgacggtaaacagtcgggaacgggctacagtttcaacattcagaatggtgggtttttgtaaacttttgctcatcgtgggatctatgctgtgaaatcagcggttattgtgcgatatcggacacgctttcggcaatgtgaattgcatgttatttacatttatgtaacttaataaataatcgtcctcaaatcaaattaaaagtcaataggttgaaataactccaggaatttgctgatattccgccttcagagggtttgctatgatcagcggttactgtgatgtgcttaatgatgctcaagttaaactccacgcttgccgatagccaaccgcagaatcatgtattgtgtccggtgcgactgaccacgcctgacagactaagtaagatggggaaagcatgagcaccattgtgatttttttagctgctttgctggcctgcagtctacttgcgggatggctgataaaagtgcgatccagacggcgtcagctgccctggaccaacgccttcgcggatgcgcaaacgcgtaaactcacacctgaagaacgtagcgccgttgaaaattatcttgagagcctgacgcaggtattacaggtgcctggcccaacgggagccagcgcggcaccgatctctctggcgctgaatgccgaaagcaacaacgtcatgatgctgacacacgctatcacgcgttacggcatctctaccgacgatccgaataaatggcgttactacctcgatagcgtagaagtccacctgccccctttctgggaacagtacatcaacgatgagaataccgttgaactgattcataccgatagcctgccgctggttattagtctcaacggtcatacgctgcaggagtacatgcaggaaactcgcagctatgccttgcaacctgttccgagtacgcaggcgagcattcgcggggaagagagtgagcaaatcgagctactcaatattcgcaaagaaacgcatgaagaatatgcgctgagtcgtccgcgcgggctgcgtgaagcgttgctgatcgtcgcctccttcctgatgttctttttctgcctgattaccccggatgtatttgttccgtggctggcaggcggcgcgttactgctgctgggcgcaggtctgtgggggctattcgcgcccccggcaaaatcctccctgcgggaaattcattgtctgcgcggtacaccccgtcgttggggattgtttggcgaaaacgatcaggaacagatcaacaatattagtctcggtattatcgacctggtctatcccgcacactggcagccatacattgctcaggatctcggtcaacaaaccgatatcgatatctatctcgaccgccatgtagtgcgtcagggacgatatcttagcctgcatgatgaagtaaaaaactttccgttacagcactggctgcgcagtacgattatcgctgcgggcagcctgctggtgctgtttatgctgttattctggatcccgctggatatgccgctgaaattcactctcagttggatgaaaggcgcgcagaccattgaagccaccagcgtaaaacaactggctgacgctggcgtgcgggtaggcgatacattgcgtattagcggtacgggaatgtgtaatattcgaacttccggaacctggagcgcgaaaaccaatagtccttttttaccgtttgactgcagccagatcatctggaacgacgcccgcagtttgccattaccagaatctgaactggtcaacaaagcgacggcattgactgaagcagttaatcgccagctgcaccctaaaccggaagatgaatctcgcgtcagtgccagtttacgtagtgcaattcaaaaatccggcatggtattgcttgatgattttggcgacattgtactgaagacagcggatttatgttctgccaaagatgactgtgtgcgactgaaaaatgcgctggtcaatctcggcaacagtaaagactgggacgcgctggtaaaacgcgccaacgccgggaagctcgatggcgtgaatgtgttattacgcccggtgagtgcggaaagcctggataacctggtggcaacctccaccgcgccgtttatcacgcatgaaacggcgcgagcggcacaaagtctaaacagtccggcccccggcggattcctgattgtcagcgacgaaggcagcgattttgttgatcagccctggcctagcgcaagtctttacgactacccgccgcaagaacagtggaacgctttccagaaactggcacaaatgctgatgcatacgccgtttaacgccgagggtatcgtcacaaaaatcttcactgacgccaatggtacgcagcatattggccttcatccgatcccggatcgttccggcctgtggcgctatctcagcaccacattgctgctactgacgatgctgggtagcgccatttacaatggcgtacaggcctggcgtcgttaccagcgtcatcgcactcgcatgatggagattcaggcctattatgaaagctgcctgaacccgcaactgatcacccctagtgaaagccttatcgaataacacgtttgcgcggcaggttatgctaccctgtcgcgcaaattgcttcactctggagatttccctcatgcatatcaacattgcctggcaggacgtagataccgttctgctggatatggacggcacgttgctcgacctcgccttcgataactatttctggcaaaagctggtgcctgaaacatggggcgcgaaaaacggggttacgccacaggaagcgatggaatatatgcgccagcaatatcacgacgtacagcatacgctaaactggtactgtcttgattactggagtgagcaactgggtctggatatctgtgcgatgaccaccgagatgggaccgcgtgccgtactgcgtgaagataccattccgtttcttgaggcactgaaagccagcggtaagcagcgaattttgctcaccaatgcgcatccgcacaacctggcggtaaaacttgagcataccggtctggacgcacaccttgatttattactttccacccacacatttggttatccgaaagaggatcagcggttatggcatgcggtggccgaagctacgggtctgaaagctgaaagaacgctgtttattgatgacagcgaagcgattctcgatgctgccgcgcaatttggtattcgttactgcctcggcgtgactaatcctgattccgggattgccgagaaacagtatcaacgccatccgagtctgaatgactaccgccgcctgatccccagcctaatgtgaaggagacgccatgaaagagaaacctgctgttgaggttcgactggataaatggctatgggctgcccgtttttataaaacccgcgcgctggcccgtgaaatgattgaaggcggtaaggtgcattacaacgggcagcgcagcaagccgagcaaaatcgtcgagctgaatgccacgctcactctgcgccagggaaatgacgaacgcacggtgattgtaaaggcgattactgaacagcgtcgccccgccagcgaggcagccttgctgtatgaagagactgcggaaagtgtagagaaacgcgaaaaaatggcgctggcacgtaaacttaatgccttaaccatgccgcacccggaccgacgcccggacaaaaaagagcgccgcgacctgttacgatttaaacacggcgacagtgaataactgtcacctgcaagagagatgattatgccgcaacatgaccaattacatcgctatctgtttgaaaactttgccgtgcgcggcgaactggtaaccgttagcgaaaccctgcaacagatccttgagaaccacgattatccgcagcccgttaaaaacgtgctggcagaactgctggttgcgaccagcctgttaaccgctacgctgaagtttgatggtgatatcaccgtacagctgcagggcgacggtccgatgaatctggcggttattaacggtaacaataaccagcagatgcgcggtgtggcgcgcgtgcagggcgaaattccagaaaatgccgacctgaaaacgctggtcggcaatggttacgtggtgatcaccattaccccgagcgaaggcgaacgctatcagggcgtagttggtctggaaggtgataccctggcggcctgcctggaagattactttatgcgttctgaacagctgccgacgcgcctgtttattcgcaccggcgacgtagacggcaaaccggctgcaggcggtatgttgttgcaggtaatgcctgcgcaaaatgcccagcaggacgactttgaccacctggcgacgctaaccgaaaccatcaaaaccgaagaactgctgaccttaccggcaaacgaagtgttgtggcgtttgtatcacgaagaagaggtgacggtttacgatccgcaggatgtggagttcaaatgcacctgcagccgtgaacgttgcgccgatgcgctgaaaacgctgcctgatgaagaagttgatagcatcctggcggaagatggcgaaattgacatgcattgtgattactgcggtaaccactatctgttcaatgcgatggatattgctgaaatccgcaacaacgcgtctccggcagatccgcaagttcattaatgagtatgtccggcagagagggctctgccggattttacgactaatacacctgatgcgctttgtcactcattcagattcacattcagcctttcaccatccactacaagatcgcgccacgctttaggcttcgtccccagttttccatccttcgcagctgtgagtaatttttctttcgttatttcgttcggaagtaaactcatatcaagcgcgtcccattcttttctgtcactgtcaaagccatagacaatgactctgtcatcattaaaagcaaacaggatccgctccgcctgaccatcactattcagatcttgctcgaccaggacgcaggcgtctttttcaatacaggtcatcacgttatagcgatcctggattaaggcgctccagaatgtcgcatcaggtttaacagaaccaggggcaattaacacattatcggctaatactttttcgcttacctgttgctgaagatgttgctctccatctaacgccatcagcagatcccgcgcgcgtttcgggtctttcataaacccggcatcgcttttcaggctctcaagcgcagcacgtccatagcgaccgctctgctcgagcatgtagatagttacctggtcactcgtgtttttgccgctctgataacgcgccatatggctgttcacgctaatgcgcatactgtccagcaccgggctattaagaagcaccagtatcaccaacaccaataagctaaccgcaaggttcactttgccctgaagaacaacgggattttgccctttacgccagacgatgctgacaaaataccccaggctccacaccagtaacaccagcaccgccagcacgccctgcaagcggtcgacagtccagccgtactgagcgacccgcagccataacgcccaggcggcgacgaacacatacagcggagcaaccagcaaagcggttttaatcaggcaacgcaacggccctgtccagggaagactcgctttttgcggatcgcggacaatagccattaagatcaattgcaaaaaggccagcgtcaacagcaacccggcggcggagatgtggcgagaaatcgcgctcaggcccgtaaacggcagggtgatgataaacatcagggttagcaaacttactaacggcagcaaccccgtggcgattaacgtgaacaacttttgaatagagtcgattaaacgactctgtgttcgcgcgaggatcaccgccagcgcggtaaccagacctaacgtgagataaataaaccagtcggttgcaaaaaagagcgtattgaaaaacgtgatgccaacaagtttaaacaactcactccacagtaaaagcaccagccacgtcaagccattggcgagaaaaatcaccagtaatataagtacgttatgccatacactctggtaaaaatagcgatagcggctactgtcattgcggatgcgaaggctttgttgtatccacggtagcaacaacattgccatcaacagcagatagcaaccaaaatcccaaagcgccttttcagctctccaggggttcatgccatcagtttgccacttcagccagccgctcatccccagcgtggcaataaacactagcgccagccatccccaaaggcgcttctgtttaaaagagatcacggagaagagtaaaacggaactaaacgcgacggtcgcaggcacgccataaacaatccaactgtgattttttccggaaagccaggcgatcagcaggtagcaaaccagaccctgaagtaatccggtagcaatcatcccccagcgtgttgcgggactaagttcaacgttatccatgttggttatccagaatcaaaaggtgggttaattatcgcatccgggcagtagtattttgcttttttcagaaaataatcaaaaaaagttagcgtggtgaatcgatactttaccggttgaatttgcatcaatttcattcaggaatgcgattccactcacaatattcccgccatataaaccaagatttaaccttttgagaacattttccacacctaaaatgctatttctgcgataatagcaaccgtttcgtgacaggaatcacggagttttttgtcaaatatgaatttctccagatacgtaaatctatgagccttgtcgcggttaacacccccaaaaagactttactattcaggcaatacatattggctaaggagcagtgaaatgcgcgttaacaatggtttgaccccgcaagaactcgaggcttatggtatcagtgacgtacatgatatcgtttacaacccaagctacgacctgctgtatcaggaagagctcgatccgagcctgacaggttatgagcgcggggtgttaactaatctgggtgccgttgccgtcgataccgggatcttcaccggtcgtagtccaaaagataagtatatcgtccgtgacgataccactcgcgatactttctggtgggcagacaaaggcaaaggtaagaacgacaacaaacctctctctccggaaacctggcagcatctgaaaggcctggtgaccaggcagctttccggcaaacgtctgttcgttgtcgacgctttctgtggtgcgaacccggatactcgtctttccgtccgtttcatcaccgaagtggcctggcaggcgcattttgtcaaaaacatgtttattcgcccgagcgatgaagaactggcaggtttcaaaccagactttatcgttatgaacggcgcgaagtgcactaacccgcagtggaaagaacagggtctcaactccgaaaacttcgtggcgtttaacctgaccgagcgcatgcagctgattggcggcacctggtacggcggcgaaatgaagaaagggatgttcagcatgatgaactacctgctgccgctgaaaggtatcgcttctatgcactgctccgccaacgttggtgagaaaggcgatgttgcggtgttcttcggcctttccggcaccggtaaaaccaccctttccaccgacccgaaacgtcgcctgattggcgatgacgaacacggctgggacgatgacggcgtgtttaacttcgaaggcggctgctacgcaaaaactatcaagctgagcaaagaagcggaacctgaaatctacaacgctatccgtcgtgatgcgttgctggaaaacgtcaccgtgcgtgaagatggcactatcgactttgatgatggtagtaaaaccgagaacacccgcgtttcttatccgatctatcacatcgataacattgttaagccggtttccaaagcgggccacgcgactaaggttatcttcctgactgctgatgctttcggcgtgttgccgccggtttctcgcctgactgccgatcaaacccagtatcacttcctctctggcttcaccgccaaactggccggtactgagcgtggcatcaccgaaccgacgccaaccttctccgcttgcttcggcgcggcattcctgagcctgcacccgactcagtacgcagaagtgctggtgaaacgtatgcaggcggcgggcgcgcaggcttatctggttaacactggctggaacggcactggcaaacgtatcagcattaaagatacccgcgccattatcgacgccatcctcaacggtagcctggataatgcagaaaccttcactctgccgatgtttaacctggcgatcccaaccgaactgccgggcgtagacacgaagattctcgatccgcgtaacacctacgcttctccggaacagtggcaggaaaaagccgaaaccctggcgaaactgtttatcgacaacttcgataaatacaccgacacccctgcgggtgccgcgctggtagcggctggtccgaaactgtaatgatttgaagctggagaatatctatccagtatcttatagaaagcaaaacgggaggcaccttcgcctcccgtttatttacccttcttttgtcgtgccctgcgcccgcgttaccggcactggcagccaggcgcgaatggaaagcccgccccgctcgctggtgccaagctccagcatcccgttatggttatccacgatacgctgcacaattgccagccctaatcccgtgccgctaatggtgcgcgcactgtcgccgcggacaaacggctggaacaggtgcttacgttgttccggcgcaattcccggaccgtcatcttccacctggaaccaggcgcgattcggctccgttccgctgctgactttgatccagccattgccataacgggcggcgttgaccaccatattcgccaccgcgcgtttgatgctcagcgggtgcattttcacttcaatgctgccggggtaaagcgcggtttcaatttcccgctcatagccactttcggcagcaatcacctcaccgagtactgcattaagatccgccatttccatcggcatctcctgcccggtgcgcaggtagtcgataaactgctcaatgatggcgttgcactcttcgatatctttattgatgctttctgccagatagccatcctgctcgctcatcatctcagtcgccaggcgaatacgcgtcagcggcgtgcgcaagtcgtgacttacccccgccatcagcagcgtgcggtcatccgccagttgcttaacaccagccgccatatggttaaaggcacgggtaacggaacgcacctcgctagcgccatactcacgcagcggcggcggaataatccctttaccaacctgcaaggctgcgtgttcgagatcgaccaacggtcggttctggatacgaataaacagccacgccccgcctatcgccaatagcataatcgccagcgtatagcggaacagcggagagaaatcgccctgatgaatttcggtcagcggcacgcgtacccagatattggggctcagccaggttttcagccagacgacagggctacttttgttgacctcaacgcgcacttccgtcgggccgcccagttgctgcgccatctgatggcttaagaattcatagtgttgcgcccaacgcagacctgcctcttcggcagcctcgttggagtagagagagatccccagctcacggtagatctcccgacggaaagcgggaggcacaaccaactgcgtgccgtcctccagttgcagtttgtcggtcatcaacatacgcacttcgtacgcgaggactttattaaactgctggaggctcggcaaaatcgcgaagttcagcaccaccagataagtcgtcaccaggctggcgaacagcaaggtgacgatgagcaataacgtacgggcaaaactacttcgtgggctgaagcgcaatcgcctcatgctttagagccgtccggtacaaagacgtagcccagaccccagacggtctgaatgtaacgcggatgcgctggatcttcttccaccatgcggcgcagacggctaatctgcacgtcgatggagcgttccattgcggaatattcacgaccacgggcaaggttcatcagcttatcgcgggagagcggctcacgcggatggctgaccagtgccttcagtaccgcaaactcaccgctggtgagcggcatcggctcgtcttcgcggaacatttcgcgcgtaccgaggttaagtttgaacttaccgaaagcaattaccgcctcttcctgactcggtgcgcctggcagttcgttcgcctgacgacgcagcaccgcacggatacgggccagcagttcacgcgggttaaacggttttggaatgtagtcgtcagcgccaatctccaggcctacgatacggtccacttcttcccctttcgccgtcaccataatgatcggcatcgggttgctctgactacgaagacgtcggcaaatgctcaagccatcttcaccaggtaacattaaatccagtaccataagatggaaagattcacgagtcagcaggcgatccatctgttctgcattagcgacgcttcgaacctggaagccttgttcggtgagataacgttccagcagcgcacgcaggcgcatgtcgtcatcgaccaccagaatcttgtagttctcttgcattgtttgtactcccaaaggttcgcaacaatttgtaagcgtgtattcttaaaaaagctcacgttcgtcaccagctaaatctggtatgaatttcagcctaaattgttacaaagcatattaaacagcagcttaagtatacaatttattcggcgaaacattattgattctgttgatatgatcacgttatacccaatgtgcgcattatcaaacagacaaagggaatcaacgagatgaaaacgcccctggttacccgggaagggtatgaaaaactcaaacaagagcttaattatctctggcgtgaagaacgcccggaggtcacaaaaaaggtgacctgggccgcaagtctgggcgaccgcagcgaaaatgctgactatcagtataataaaaagcgtctgcgtgaaatcgaccgtcgcgtgcgctatctcactaaatgcctggaaaatctcaaaatcgtcgattactcccctcagcaggaaggcaaagtcttttttggcgcgtgggtggagattgaaaacgacgatggcgtgactcaccgtttccgtattgtcggctacgatgaaatttttggccgtaaagattacatctctatcgattccccgatggcccgcgcattgctgaaaaaagaagtcggcgatctggcggtggtgaatacccctgccggggaagcgagctggtatgttaatgctatcgagtacgtgaaaccgtaaggaagagtcttaacctcctgccgatggctggcatttttgccagccagtccgtataactatcccctgatttttgatccgaaaagatgaactcaaaccatgatgaatgatagcttctgccgcattattgcgggtgaaattcaggcgcgcccggaacaggttgacgctgccgttcgcctgcttgacgaagggaataccgtgccgtttatcgcacgttatcgtaaggaaatcaccggcggtctggatgacacgcagctgcgtaatctggaaacgcgtctgagctatctgcgcgagctggaagagagacgtcaggcgatcctcaagtccatttccgagcaaggcaaactcaccgatgatctggcgaaggccatcaacgccaccctaagcaaaaccgaactcgaagacctctacctgccctacaaacctaaacgccgcacccgcgggcaaatcgccattgaagcagggcttgagccgttggctgacctgctgtggagcgatccgagtcacacgccagaagtcgccgctgcacaatatgtttatgccgataaaggcgtggcagataccaaagccgcgctggatggcgcgcgctatatcctgatggaacggtttgccgaagatgccgcgctgctggcgaaagtgcgtgattatctgtggaagaacgcgcatttggtttctacggtggtgagcggtaaagaagaggaaggggcgaaattccgcgactatttcgatcatcacgaaccgttgtccacggtgccttctcaccgcgcgctggcgatgttccgtgggcgtaacgaaggcgtacttcagcttagcctgaatgccgatccacagttcgatgagccgcccaaagagagctattgcgagcaaatcatcatggatcaccttggcctgcgcctgaacaatgccccggcggatagctggcgcaaaggcgtggtgagctggacgtggcgcatcaaggtgctgatgcatctggaaaccgaactgatgggcaccgtgcgcgaacgtgcggaagatgaagcaatcaacgtctttgcccgtaacctgcacgatctgctgatggcggcccctgccggactgcgtgcaacgatgggcctcgatccgggtctgcgtactggggtaaaagtggcggtggtcgatgccactggcaaactggtggcgaccgacaccatttacccgcacaccggacaggccgcaaaagcagcgatgaccgttgctgcgctgtgtgaaaaacataacgttgaactggtagcgatcggtaacggtacagcttcccgcgaaactgagcgtttctatctcgatgtgcagaagcagttcccgaaagtgaccgcgcagaaagtaatcgtcagcgaagcaggcgcgagcgtttacagcgcttccgagctggctgcacaggagttcccggatctcgacgttagcctgcgtggcgcggtgtctatcgcccgccgtttgcaggatccgctggcggagctggtgaaaatcgatccgaaatctatcggcgtaggtcagtatcagcatgacgtcagccagacgcaactggcccgcaaactggacgcagtagtagaagactgcgtaaacgccgttggcgtcgatctcaacactgcttctgttccgctgttaacccgcgtggcgggcctgacgcgcatgatggcgcaaaacatcgttgcctggcgcgatgagaacggtcagttccagaaccgtcagcaactgttaaaagtgagccgtctggggccgaaagccttcgagcagtgcgcgggcttcttgcgcattaaccacggtgataacccgctggacgcgtctaccgttcacccggaagcctatccggtggtggaacgcattctggcagcaacacagcaggcactgaaagatctgatgggtaacagcagcgaactgcgtaacctgaaagcgtctgactttactgatgagaaattcggtgtgccgacggtaaccgacatcatcaaagagctggaaaaaccgggtcgcgatccgcgtccggaatttaaaaccgctcagtttgccgatggcgtcgagacaatgaacgacctgcaaccgggtatgatcctcgaaggcgcagtgaccaacgtcaccaactttggcgcgtttgtcgatattggcgtgcatcaggacggcctggttcacatctctagtttgagcaacaagtttgtggaagatccgcataccgtggtgaaagcgggcgacattgtgaaggtgaaagtgctggaagtggatcttcagcgtaaacgtatcgccctgactatgcgcctggatgagcagcctggcgaaaccaacgctcgtcgcggcggcggtaatgaacgcccgcaaaacaaccgcccggcagccaaaccacgcggtcgtgaagcgcagcctgccggtaatagcgcgatgatggatgcgctggcggcggcaatgggcaaaaaacgttaaacgcccgtactggcctacggttcgaatttgcacgaaatcgtagggcagataaggcgttcacgccgcatctggcaacgaacgccttgcctgacataaaagtgccggagaatatctccggcatttttattccacagccaaactcataatatattccggcaatatttatcatttcattaacaactgaaaccttaattaaacattagccagtccgggtaattcactattcgaattatattttcgctgcgatataaccttgagccacatcaacattgagtcagattattattcaaaccaacattcgcacacattttaagtattgctgatagaaaccattctcattatcattgtgttgttgattatttaatctctcctttgttggcaaatcatctggtctcatgtcgctgtcaaacgccccatgaggtagttatccagttaatgagaaacaagtaggcacctatgcaatacactccagatactgcgtggaaaatcactggcttttcccgtgaaatcagcccggcatatcgccaaaaactgctttctcttggcatgttacctggctcctcttttaatgtggtgcgcgtcgctccactcggcgaccccattcatatcgaaacccgtcgtgtgagcctggtattacgcaaaaaagatctggccttattagaagtggaagcggtttcctgttaatacggtgataacaacaatgaaaaaattaaccattggcttaattggtaatccaaattctggcaagacaacgttatttaaccagctcactggcagtcgtcagcgtgtaggtaactgggctggcgttaccgtcgaacgtaaagaagggcaattctccaccaccgatcatcaggtcacgctggtggacctgcccggcacctattctctgaccaccatcagtagccagaccagcctcgatgagcaaatcgcctgtcactacattttgagtggcgacgccgacctgctgattaacgtggtggatgcgtctaaccttgagcgtaacctgtacctgacgctacaactgctggaactcggcattccctgcattgtggcactgaacatgctcgacattgccgagaagcaaaatattcgtattgaaattgatgctctgagcgcgcgtctgggctgtccggtgatcccgctggttagtacccgtggtcgcggtattgaagcgctcaagctggcgattgatcgctataaagctaacgagaatgtggaactggtgcattacgcacagccgctgctcaacgaagcagatagtctggcaaaagtgatgccttccgacatcccgctgaaacaacgtcgctggctgggcctgcaaatgctggaaggcgatatctacagccgcgcctacgccggtgaagcgagccagcatctggatgccgccctcgcccgtctgcgtaatgagatggacgatccggcgctgcacattgccgatgcgcgttaccagtgcattgctgccatctgtgatgtggtaagcaacaccctgacggcagaacccagccgtttcaccactgcggtagataaaatcgtgctcaaccgtttcctcggtctgccgattttcctctttgtgatgtacctgatgttcctgctggctatcaacatcggcggggcgttacagccgctgtttgacgtcggctccgtggcgctatttgtgcatggtattcaatggattggctacacgctccacttcccggactggctgactatcttcctcgcccagggcctgggtggcggcattaacaccgtgctgccactggtgccgcagattggcatgatgtacctgttcctctccttccttgaggactccgggtatatggcgcgtgcggcgtttgtgatggaccgtctgatgcaggcgctgggcttgccggggaaatcctttgtgccgctgatcgtcggtttcggttgtaacgtaccgagcgtaatgggtgcacgtacgcttgatgcaccgcgtgaacgtctgatgaccatcatgatggcaccgtttatgtcctgcggcgcgcgtctggctatcttcgcagtattcgcggctgccttcttcgggcagaacggtgcgctggcggtcttcagcctgtatatgctgggtattgtgatggcggtgctgactggcctgatgctcaagtacaccatcatgcgcggtgaagcgacgccgtttgtcatggagttgccggtctatcatgtaccacacgttaaaagcctgattatccagacctggcagcgtctgaaaggcttcgttctgcgtgctggtaaagtgatcatcatcgtcagcattttcctgagcgctttcaacagcttcagcctgagcgggaaaatcgtcgataacatcaacgacagcgcgctggcgtccgtcagccgggtgatcaccccggtcttcaagccaattggcgtgcatgaagataactggcaggcaacggttggcctgtttacaggtgccatggcgaaagaagtggtagtgggtacgctcaacaccctctacaccgcagaaaatattcaggacgaagagttcaatccggcagaatttaacctcggtgaagagctgttcagtgcgatagatgaaacctggcagagcctgaaagacaccttcagccttagcgtactgatgaaccccattgaagccagcaaaggcgacggcgaaatgggtaccggggcgatgggcgtgatggatcagaaattcggtagcgcagcagcagcttacagctacctgattttcgtcctgctgtatgtaccatgtatcagcgtgatgggggctatcgcccgtgaaagtagccgtggctggatgggcttctccatcctgtgggggctgaatatcgcttacagtctggcaacattgttctatcaggtcgccagctacagtcagcatccaacttacagcctggtgtgcattctggcggttatcctgtttaacatcgtggttatcggtctgctgcgccgcgcgcgtagccgggtggatatcgaactgctggcaacccgcaagagcgtaagcagttgctgcgcagccagcaccaccggtgattgccattaatggctagtcttattcaggtgcgcgatttgctggcgttacggggccgtatggaagcggcccagataagccagacattgaacactccacagccaatgattaacgccatgctgcaacaactggaaagtatgggcaaagccgtgcggattcaggaagaacctgacggctgcctctctggcagttgtaaaagctgcccggaaggaaaagcctgtctgcgcgagtggtgggcgctgcgttaaccttactccatcgcctgttttggaaagcccggtatgcgtctgcatccgggcttttttgcgtgcggctttccataaaaatgcaactcttgcagcacggcgtaagttcctttgaaagcatctcgcagggatgaaaactcgctaatacacaggtgtggagtggcgcgtagagtcgcggcattcaaacaacaggtgaaggaacgccatgagcaaaaagcagagttccaccccacacgatgcgctgttcaaactctttttacgccaaccggacacggctcgtgattttcttgcgtttcatttaccggcacccattcacgcgctttgtgatatgaaaaccctcaagctggagagcagcagctttattgatgacgatctgcgtgaaagctattccgatgtgctgtggagcgtgaaaacggaacaaggaccaggatacatctattgtctgattgaacatcaaagcaccagtaacaaactgatcgcatttcgcatgatgcgttacgctattgccgcaatgcaaaatcaccttgatgctggatacaaaacgttgccgatggtggtgccattgttgttttaccacggtattgaaagcccctatccctatagcctgtgttggctggattgtttcgccgatcccaaactggcaaggcagctttatgcctccgcatttccgctgattgatgtcaccgtcatgcctgatgatgaaatcatgcagcaccgacgtatggcgctgctggagttaattcaaaaacatattcgtcaacgcgacctgatggggctggtagagcaaatggcctgcttattaagtagtggatacgctaatgacagacaaatcaaagggctgtttaattacatactgcaaactggcgacgctgtacgttttaacgattttatcgacggcgttgccgaacgtagtccgaaacacaaggagagtttaatgactattgcggaaagattgcggcaggagggggaacaatccaaagccctgcatatagccaaaataatgcttgaatccggagttcctcttgcagacatcatgcgctttaccgggctgagtgaagaagagttggctgcggcgagtcagtaaagttctgtctcgccatttcaaaagccacttacaccctctgcttcaacgccaccagcaggtgacaaaactcggccggatggctaataaatggcgcatgggccgctttggcgaagatataactttcgctgtgaggccaaagtttatccagcatcggcaccactttgcgcggcaccagaccgtcgagatagccatacaatcgcaaaaacggcatggacacgttttgcagcggctgacggagatcgaccgttttcaggatttccagcccgccattaagcacgtcaacctccggcatcggtaacgccagaacggttttcttcaacgcccgcgcatcctggcgcgccgtttcagtccccatggtttgtaacgccaggaaccgctccactgtacgctgaaaatcatcactgagttgctgctgaaatcccgccagcacgtccggttttatccccggccactcgtcacgagcactaaaacaaggactgctcgccacggtgaccagcgcctgaacacgctcgggatgggttaacgcaatctggcttgccaccagcccgcccagactccagcctaaccaaatggctttatcaggtgcctgttgcagcacggcttcggccatatcagcaagactcagcgcaccaaatccccggctacgcccgaagccgggcaggtcaacaaggtgcagcgtaaaatggctgctaagttcctcgtcaatgcaacgccacacttcggcattcagtccccatccgtgcagcagcacaagatgaacattcccctgacctttggtctgccaccagatgttattcatccgctattgttctcttttgacttacaaggatgaacatatgctaacagtaccgggattatgctggctatgccgaatgccactggcgttaggtcattgggggatttgtagcgtctgtagtcgcgccacccgcacagataaaacgttatgcccacaatgtggattacccgccacacactcccatcttccctgcggtcgctgcctgcaaaaaccgccgccctggcaaagactggtcacggttgccgactatgcgccgccgttaagtccgcttatccaccagcttaaattttcccggcgcagtgaaatcgccagcgccctgagtcgtctgttactattggaagtcttacacgctcgtcgcaccaccgggttgcaattgccggatcgcatcgtcagcgttccgttatggcagcggcgtcactggcgtcggggatttaatcagagcgatttgctgtgtcagccgttaagtcgctggttgcactgccaatgggatagcgaagccgtcacacgtacacgggccactgcgacccagcattttctcagtgcccggctgcgcaagcgcaacctgaaaaatgcctttcgtcttgaattgcccgtgcaaggtcgccatatggtgattgtggatgatgtcgttaccaccggaagtaccgtcgcagagattgcgcagttgcttttacgcaatggtgcggcggctgtccaggtctggtgcctttgtcgaaccttgtaaagcctcgatgatgggcgtattataaccaactaaaatagtcaactattaggccattactatgatccgtatttccgatgctgcacaagcgcactttgccaaactgctggcaaatcaggaagaagggacacaaatccgcgtatttgtgattaaccctggcacgcctaacgctgaatgtggcgtttcttattgtccgccggacgctgtggaagccaccgacacagccctgaaatttgacctgctgaccgcgtatgttgatgagttaagcgcaccatacctggaagatgcagagatcgattttgttaccgaccagttgggttcccagttaacgctgaaagccccgaacgccaaaatgcgtaaagtggcagacgatgcaccgctgatggagcgcgtggagtatatgctgcagagccagatcaacccacagcttgctggtcacggtggtcgcgttagcctgatggaaatcaccgaagacggttacgccattctgcaatttggcggcggctgtaacggttgttccatggtcgatgtgacgctgaaagaagggatcgagaagcagctgctgaacgaattcccggagctgaaaggtgtgcgcgatctcaccgaacaccagcgcggcgaacactcctactactaagttatcccctcttttgtagattgcccgatgcgacgctaaagcgtcatttcgggcctacgttgaacatgtgccagacgttggcgcagcattgctttgtcaaatcctcggttcgtttccccgcgataatatgaccaacctctcataatttaaatttaccccgctctggtgattctcaaacgccagatgttacccgtatcattcacatgggtaccaaacatactcctgacatctgactacaataattagttttagtgggtatcagtcgtggtgccgcaatatctctgttcccgattgggataattagagtttgtcgtcagaaaattgacgttacccataacaaatgaaaggccaggtaaatcatgccattagtcattgttgctatcggtgtaatcttgttgttgctcctgatgatccgcttcaaaatgaacggcttcatcgctctcgtcctcgtggcgcttgctgttggattaatgcaaggaatgccgctggataaagttattggctccatcaaagccggtgtcggcgggacgctcggtagccttgccctgatcatgggttttggcgcaatgctgggcaaaatgctggcagactgcggtggcgcacaacgtatcgccaccacgctgattgccaaatttggtaaaaaacacatccagtgggcggtggtactgaccggttttaccgttggttttgccctgttctatgaagtgggctttgtgctgatgctgccgctggtgtttaccatcgcggcttctgcgaatattccactgctgtatgttggtgtaccaatggcggctgcactgtctgtgacccacggcttcctgccaccgcatccgggtccgactgcgattgccaccattttcaatgccgatatgggtaaaaccctgctgtacggtactattctggcaatcccgaccgtgattctcgccggtccggtttacgctcgcgtgttgaaaggtatcgataagccaattccggaaggtctctacagcgcgaaaaccttcagcgaagaagagatgccgagctttggcgtcagcgtctggacctctctggtgccggtagtactgatggcgatgcgtgcgattgccgaaatgatcctgccgaaaggtcacgctttcctgccggtagcggagttcctcggtgacccggtaatggcaacgctgattgccgtgctgattgcgatgttcacctttggtctaaaccgtggtcgtagtatggatcagattaacgacacgctggtttcttccatcaaaatcattgcgatgatgctgttgatcatcggtggtggcggtgcgttcaagcaggtgctggtagacagcggcgtggacaaatacattgcttccatgatgcacgaaaccaacatttctccgctgctgatggcctggagcattgctgccgtactgcgtatcgcgctgggttccgcaaccgttgcggcaatcactgcgggtggtatcgcggcaccgctgattgcaacgacgggtgttagcccggagctgatggttattgcggttggttccggtagtgtgattttctctcatgtgaacgatccgggcttctggctgttcaaagagtactttaacctgactatcggcgagaccatcaaatcctggagcatgctggaaaccattatcagcgtgtgcggtctggtaggctgtctgctgctgaatatggtgatttgataacactgactgccggatgcggcgtgaccgccttatccggcctacgattcgggatgaattagtaggccggataagacgcgtcaagcatcgcatccggcatcaaccgcactttacttcttcttcgctgcagctctgcgccgtctgtccaaatccttcagcaacttgttcacgccatcatcggcaaacatgctctcaagcgttgcggaaagcttgcgtcgccagtttttatactggtaactggtgccaggaatattcaccggttcggccatatccagccagtcttccggctgtagtcctaacagagcactgttactgtcggcaatgtagcgctgcaaaccacggttcagcgtcggcgtcatgctcatcaagcttgccttatgcccggcacgtttcggcagacaaccatatttatgcagtgcatccagcagcccttgcttcgccagttcgcgatcctgatacagaccgcgcagtaccacttcatccggatacagccccagggttttgcccagcgttagatccccgcactcccagtaaccgcgcagcgttggcaggtcatgtgtcgccgcaaccgccatgctctgctccggatacgctttcggtgcacggaacgtcttctcgtggtcgttttcgaaatagagcactttgtaagagtacacaccgctgctgcgcagcttaccgacaatctctaccggtacggtaccgagatcttcaccaatcaccatacagcgatgacgtttactttcgagtgccagaatgctgagcagatcatccaccggatagtgaacatacgcgccctgatctgccgtctcgccatacggtatccaccacaaacgcagcatgctcatcacatggtcaattcgtaatgcgccgcagttttgcatattggcacgcaacagctcgataaacggttcataggcacgcgcggtgatgatatgcgggtccattggcggtaatccccagttctgccccaacgggccgaggatatccggcggcgcgccaacgcttgctttcaggcaatatagttcacggtcacaccaggtttccgccccaccttccgctacgccaaccgccagatcacgatacaagccaatcggcatttcatagccctggcttatctcccagcaggcggcaaactggctgtaagccagccactgcaaccagagataaaaatcgacgtcatcacgatgttcttcgcagaactgacgcacttctggactatccacgttctgatacatctctggccatgcaggccagccccagcgcatttcgtcctctttcacttgctgggcatgtagcgcatcaaaggctgcctgccagaacaggctgtcgccctgctctgcaacaaactggcgaaacgcggccatctgctcatcatcacgttgcgcgaaacctttccacgccattcgtaatgctgtcatttttagggcggtaaccgtggagtaatcgacccagtcggcatcgcgcgcctgttgcagcgtctgttgcgtggtcggcaactgccaccaggcctgagcctcttcgctaagatggaaatcttcaacggcgttaacgtcgatataaatcacattcagccaacggcgagaagacgggctgtatgggctggcgctctccggatttgccggatagagcgcatgaatcgggttcaggccaatgaagctcccgccacgttttgccacatccaccagcatcgctttgagatcgccaaaatccccaataccccagtttttttcgcttcgcagcgtataaagctgaacgcaggcaccccacagcttttgtttattcagcaacgcctgcggttcgtaacagcgtttcggggcgacaatcacccggcaatgcgcgcgctggtcgtcctgggtgagtgtcagcgtgtgataaccttccggcagcttcgtcggtagattgaacgctttgccccccgttacatggcctttgtactgcgttccttcttcggtggtcagcagccagctatattcgccgctgccctccaccaccatcggcatttttttgccgctggtataaaccatgacattcgggactggcgttaccgccactttcgtggcggtacgttgatgcatcgcgtcaagcaaacgccgtttggtttcggcgctaatgctctgcggtttaccgtgggcattgatgtaattggggctaatccccgccgccagcgcggcattatccagacgtttgctttccatcgagcttccttagcgttttgcctgccagatacgagcctgataatcgcgaatagagcgatcgctgctaaacataccgcagcgggcggtattgaggatcgccgcgcgagtccaggcctcctggtcgcggtacagcacatccacctgcttttgtgcctctacataggctgcgaaatccgccatcaccagatacggatcgccgccctgtttgccgatactgtgcagcatctggtcgaaggcatgcttatcgccgtcgctgtatttaccgctttccagctctttcaatactgcgtccagcaccttatctttcttccgccatttcaccgggtcgtagcctttggccagaattgccttcacttgttccacggtatgaccaaaaataaagatattttcttcaccgactttctcggcgatttcaacgttcgccccatccagcgtaccgacagtaagcgcaccattgagcgccagtttcatattgccggtaccggaagcttctttacctgcagtgctaatttgttcggagatatccgccgccgggatcagtttttccgccgcgctaacgcaataatccggcaggaacaccaccttcaacttatcgccaaccagcggatcgttgttgatcacgtcagccactttgttgatcgcaaagataatattcttcgccaggtagtagcccggtgccgctttcgcgccgaagaggaagacgcgcggtacgcgatcagcctgcgggttttcacgaatttctttgtacaacgccagaatatgcagcagattcaggtgctggcgtttgtactcatgcaaacgtttgatctgaatatcgaaaatcgcctgtggattgatctcaataccggtacgaactttcacaaactccgccagacggactttattcgcctgcttgatctcgcgatattgctgacggaatttcgcatcatcagcgaatttttccagattgatcagctgatcgagatcgttagcccactctttttgcagacttttatccaacagagccgccagtgccgggttgcactgtttgatccagcgacgtggggtaataccgttggtgacgttatggaatttgttcggccatagctggtgatattccgggaacagatctttcaccaccagatcgctgtgcagcgccgcaacaccgttcaccgcgaaaccgccaaccacacacaggttcgccatatgcacttgtttgtcgtgcaccaccgccagtttggcccacactttttcatcgcccggccaggttttctctaccagcgttttaaagcgagtattaatttcgttaataatctgcatgtggcgcggcagtaagcctttcaccagtttcacatcccagcgttccagcgcttctggcatcagggtatggttggtgtaagcgaaagttttgctggtaatggcccaggcgtcatcccagctcatctggtgctcatcgatcagcacgcgcagcagttctggaatcgcgatagttgggtgggtatcgttcagctgaataacttcgtaatccgccagttcgtgcagtttacgccccgccagatgatggcgacgcaaaatatccgctacgctacaggcacactggaagtattgctgcatcaggcgcagctttttaccggcagtatggttgtcgtttggatagagaactttggtcagtttttccgcattgatgccctgctgttcggcacgcaagaaatcaccgtcgttaaatttagtcagatcaaacggatgcgcgtgcgtcgcctgccacagacgcagcggctgcgccacgccattacgatagccgacaacggggagatcccacgcttgaccggtaatggtaaactccggctcccagcgtccgtctttcgtcactttaccgccaatccctacctgcacatccagtgcttcgttgtggcggaaccacgggtagttactgcgatgccagtcatccggcgcttcaacctgtttgccatcgacaaaagactggcggaacaaaccatattgatagttcagaccgtaacccgtcgcagactgaccgacagttgccatactgtcgaggaagcacgccgccagacgtcccagaccaccgttacccagcgccgggtcgatctcttcttccagcaggtccgtcagattgatgtcataagccttcaagctatcctgtacatcctgataccagccgagattcaacaggttgttgcccgtcaggcgaccaatcaaaaactccatactgatgtagttaacatgtcgctgattcgccaccggcttggcgaatggctgagcacgcagcatttcggccagtgcttcactcactgctagccaccactggcgaggagtcatttcagccgcagaatttaagccataacgctgccactgacgactaagcgcttcctgaaattgcttatcgttaaaaataggttgactcataggagttccacttttcttagattttcaacacaacgttatcgctagtttgccaggctcgatgttgaccttcctcatcctgcgggggattaggcagggaggagttgcggggatgagcaaggaaatgtgatctcaaccacttaaagctagtgcaaaccacaggattagcatcaaatcaatgcaatacagcgcagaaaatctgtatctaagtgcaaaaaatggccgttgcgtattttcaaaaagcggaaggtaactctataaattaagtaaaggagtgaaacagtttcataagtaaaatatccagtgtgctccatctcattcttaatagatttattaagatcatctttttagatggcactttcatcaggaatgaagaagaaacccttgcttaaatgaatctgatgaacataagggaaaccagtattcacgctggatcagcgtcgttttaggtgagttgttaataaagatttggaattgtgacacagtgcaaattcagacacataaaaaaacgtcatcgcttgcattagaaaggtttctggccgaccttataaccattaattacgaagcgcaaaaaaaataatatttcctcattttccacagtgaagtgattaactatgctgattccgagtaaactaagtcgtccggttcgactcgaccataccgtggttcgtgagcgcctgctggctaaactttccggcgcgaacaacttccggctggcgctgatcacgagtcctgcgggctacggaaagaccaccctcatttcccagtgggcggcaggcaaaaacgatatcggctggtacagcctggatgaaggtgataaccagcaagagcgtttcgccagctatctcattgccgccgtgcagcaggcaaccaacggtcactgtgcgatatgtgagacgatggcgcaaaaacggcaatatgccagcctgacgagtctcttcgcccagcttttcattgagctggcggaatggcatagcccactttatctggtcatcgatgactatcatctgatcactaatccagtgatccacgagagtatgcgcttctttattcgccatcaaccagaaaatctcaccctggtggtgttgagtcgcaaccttccgcaactgggcattgccaatctgcgtgttcgtgatcaactgctggaaattggcagtcagcaactggcatttacccatcaggaagcgaagcagttttttgattgccgtctgagtagcccgattgaagccgcagaaagcagtcggatttgcgatgacgtttccggttgggcgacggcactacagctaatcgccctctccgcccggcagaatacccacagtgcccataagagcgcacgccgcctggcgggaatcaatgccagccatcttagcgattatctggtcgatgaggttttggataacgtcgatctcgcaacgcgccattttctgttgaaaagcgccattttgcgcagtatgaacgatgccctcatcacccgtgtgaccggcgaagaaaacgggcaaatgcgcctcgaagagattgagcgtcaggggctgtttttacagcggatggatgataccggcgagtggttctgctatcacccgctgtttggtaacttcctgcgccagcgctgccagtgggaactggcggcggagctgccggaaatccaccgtgccgccgcagaaagctggatggcccagggatttcccagcgaagcaattcatcatgcgctggcggcaggcgatgcgctgatgctgcgcgatattctgcttaatcacgcctggagtctgttcaaccatagcgaactgagcctgctggaagagagccttaaggccctgccgtgggacagcttgctggaaaatccgcagttggtgttattgcaggcgtggctgatgcaaagccaacatcgctacggcgaagttaacaccctgctagcccgtgctgaacatgaaatcaaggacatcagagaagacaccatgcacgcagaatttaacgctctgcgcgcccaggtggcgattaacgatggtaatccggatgaagcggaacggctggcaaaactggcactggaagagctgccgccgggctggttctatagccgcattgtggcaaccagcgtgctgggtgaagtgctgcactgcaaaggcgaattgacccgcagtctggcgctaatgcagcaaaccgaacagatggcacgccagcacgatgtctggcactacgctttgtggagtttaatccagcaaagtgaaattctgtttgcccaagggttcctgcaaaccgcgtgggaaacgcaggaaaaagcattccagctgatcaacgagcagcatctggaacagctgccaatgcatgagtttctggtgcgcattcgtgcgcagctgttatgggcctgggcgcggctggatgaagccgaagcgagcgcgcgtagcgggattgaagtcttgagctcttatcagccacagcaacagcttcagtgcctggcaatgttgattcaatgcagcctggcccgtggtgatttagataacgcccgtagccagctgaaccgtctggaaaacctgctggggaatggcaaatatcacagcgactggatctctaacgccaacaaagtccgggtgatttactggcaaatgaccggcgataaagccgccgctgccaactggttgcgtcatacggctaaaccagagtttgcgaacaaccacttcctgcaaggtcaatggcgcaacattgcccgtgcacaaatcttgctgggcgagtttgaaccggcagaaattgttctcgaagaactcaatgaaaatgcccggagtctgcggttgatgagcgatctcaaccgtaacctgttgctgcttaatcaactgtactggcaggccggacgtaaaagtgacgcccagcgcgtgttgctggacgcattaaaactggcgaatcgcaccggatttatcagccattttgtcatcgaaggcgaagcgatggcgcaacaactgcgtcagctgattcagcttaatacgctgccggaactggaacagcatcgcgcgcagcgtattctgcgagaaatcaatcaacatcatcggcataaattcgcccatttcgatgagaatttcgttgaacgtctgctaaatcatcctgaagtacctgaactgatccgcaccagcccgctgacgcaacgtgaatggcaggtactggggctgatctactctggttacagcaatgagcaaattgccggagaactggaagtcgcggcaaccaccatcaaaacgcatatccgcaatctgtatcagaaactcggcgtggcccatcgccaggatgcggtacaacacgcccagcaattgctgaagatgatggggtacggcgtgtaagtttagccggataacgcgccagatccggcttacatctctgcatcattcaatgctcacccgcgttacgccatctgtttctatcaaactaaaccgcaccggcaagaaacgctccaccaccgcgatattggtcagcagatggcaactgggatgggcgaccgtaaattcccccgcgcccgccagcgccatcggtagcaccagttggtcagcaagatattcccccaccgccgccgtgcttgccaggtagcgtttcacctctttcaccaactgtgccgcaaccacctcggcactgacgcgcttttcaccgacgacaaaaaagcgttcggtgatattttcactttcgacttcaaggctgacggtattacccggcccctggtcgcgcggcaggttatgaatattctgttcatgcagggaaaaactccccgccagtgtagcgatttcacgctcagcaacatggcgcggcacaccagctaatagaacttctccacgcatctgcacaatgttcccgcgctcgccaagttgcaaggtgttaaagcttgccacggggctgacttccgttgccaccacaccgcctccggcagggtaaaaaccgtggcgtaacagcgtggtttgctgatgaattcctattttcgccagcagcggctccagcacccggcggataaaatccgcaggcggcgcgctcgggttatcggtgccgccgctcacttcaacacggctaggtccatcggcaaaccacagcgcgggcagcaccgtttgcagcaccagcgtacaacttccggcgctaccgatagcaaagcggtaatcgccgccgcgcacggtgccgggccggaagagcagacgctggctccccagctccgcgccttccacggttgctccgcaaatttccgtcgccgcctttaccgcggtcagatgctggcgcaacagccccggtttcgcccgcccggcacgaatgctggtgatggtaaatggctggccggttatcatgctcaggctcagcgcgctgcgcaggatctgcccgccaccttcgccctgtgcgccatccagcgcaatcatccttttcatcatttatccttttacgcacaccacctgacgcagggtatagataacttccaccagatcgctttgtgccgccatcaccgcatcaatatctttatacgccatcgggatttcgtcgatcacttcggcatctttacggcattccacatgcgcggtggcacgaatttgatcttccacgctgaacagttttttcgctttagttcggctcattacccgcccggcaccgtggctgcagctacagaagctctcttcatttcccagcccacggacgataaagctttttgctcccatgctaccgggaataattccatattgaccagcacgcgcagacaccgcgcctttacgcgtcacgtagatctcttcaccaaagtgctgttctttttgcacatagttgtggtgacagttgatctcttccatcgccagcgtttgtggctgtctgaccgttttctgcgtaatgctctgcaatgccgttaccacgttttccatcatcgcatcgcggttaaggctggcaaaaagctgcgcccaggccacggctttcaggtaatcatcaaagtattccgtaccttccataaagtacgccagatcacggctcggcaacgtctcaagcgtttcctgcatctctttttgtgccagatcgataaagtaagtcccgatggcgttaccaattccgcgactaccggagtgcagcataatccacacctggtcgctctcatcaaggcagatttcaataaagtggttaccggttcccagcgttcccaggtgtttatagttattggtattcaggaaacggggatatttttgcgttaaccactgataaccggcttcaagctcagcccatttagcatcgacgttaacaggtggattttcccaggcacctttatcacgtttacaacggccagtggtacgcccgtgcggcacggccgtttcaatcgcctgacgcagctctgccaggttttcaggcaggtcttccgccgttaacgcggtacgcagcgcgttcattccacagccaatatccacgcccaccgccgccggaataatcgcccctttggtcgggatcacgctaccaatggtggaacctttacccaggtgtacatcaggcattaccgcaatatgtttgaaaataaacggcatcttcgccgtattaataagttgctgacgcgcatcggcctctaccggcacgcctttggtccacatttttaccggggcattttcagtggtcagtaattcgtaattcattttgtttttctcttttcgttgtttgctgtcctgataattgcaaccgtcgtgccagaaaattaaataagcagcttaattttttaattcattgttttaaaaaagattatatctttacgtccgtaaccggagatttcccgcaaagccaatttaccgataatgaaatatcgtcttttataaggatatctaagatgcgtaaaacagtggcttttggctttgtcggtaccgtactggattatgccgggcgcggcagtcagcgctggagtaaatggcgtccgacactctgtttatgccagcaagaaagcttggtcatcgatcgactggaattgttgcacgacgcccgcagccgcagcctatttgaaacgcttaaacgcgatatcgccagcgttagcccagaaacagaagtggtgagcgttgagattgaactgcataacccgtgggatttcgaagaggtctacgcctgcctgcatgatttcgcccgtggttacgagtttcagccagaaaaagaagactatttaattcacatcaccaccggtacccacgtcgcgcagatttgctggtttctgctggcagaagcgcgttacctgcccgcccggctgatacaatctagtcctccgcgcaaaaaagaacagccgcgcggcccaggtgaagtaacgattatcgatctcgatttaagccgttataacgccatcgccagccgctttgccgaggaacgccagcaaacgcttgattttcttaagtccggcattgccacgcgtaacccccacttcaaccgcatgattgagcagatcgaaaaagtggcgatcaaatcccgcgcgccgattctgcttaacggtccaaccggcgcgggcaagagttttctggcgcgacgcatcttagagttaaaacaggcgcggcatcagtttagcggcgcgtttgtggaagtgaactgcgccaccctgcgcggcgataccgccatgagcacgctgtttggtcatgtaaaaggcgcgtttaccggggcgcgggaatctcgtgaaggtttattacgcagcgccaacggcggaatgttgtttcttgatgagattggcgaactgggcgcagacgaacaggcaatgctgctgaaagccattgaagagaaaaccttttacccgtttggcagcgatcgccaggtgagcagtgattttcagcttatcgccggaacggtgcgcgatttgcgccagctggttgccgaaggcaaatttcgcgaagatctgtacgcgcggatcaatctctggaccttcaccctgccgggtctacgccagcgccaggaagatattgaaccgaacctggattatgaagtggagcgccacgccagtctcactggcgacagcgtgcgttttaacaccgaagcgcggcgcgcctggttggcttttgcgacctctccccaggcaacatggcgcggtaactttcgcgaactttctgccagcgtcacgcggatggccacctttgccactagcggacgcatcactctggacgtggttgaagatgagataaaccgtctgcgctataactggcaggagagccgcccctccgcgcttacggcgttgctgggcgcagaggcagaaaacatcgatctcttcgaccgtatgcaactggaacacgttatcgctatctgccgccaggcaaagagcctttccgcagccggacgccagctttttgacgttagccgccagggcaaagccagcgtcaatgacgcggatcggctacgcaaatacctggcgcgttttggtctgacgtgggaagccgtgcaggatcagcacagctccagttgaatatggtggtccgtcagcacctgcatcacgcttactggcggcggggcgtcggtgtagacggcatctaccatgctgatgctgcccatattgaccatcgcgttacggccaaatttcgagtgatcgacaaccagcataacgtggcgcgagttctcaataatggcgcgtttggtgcgaacttcgtggtaatcgaactccagcagcgagccgtcgctatcgatgccgcttatccccagaatgccgaaatcaaggcggaactgggagataaaatcgagcgtcgcttcgccaatgatcccgccatcgcggctgcgtaattcgccaccggcgagaatgatgcgaaaatcttcttttaccatcaacgtgttagcaacgttgagattgttggtgacaatgcgcaaattgctgtgattgagcagtgcgtgcgctaccgcttccggcgtggtgccgatatcgataaacagcgtcgagccattggggatttgctccgccactttgcgggcgatgcgctctttttcttcggtctgggtggccttgcgatcgtgccacggcgtgttaaccgaactggaaggcagcgccgcaccgccatgatggccaggatcaggttttgctccgccagctcattgaggtcgcggcgaatagtctgcgggctgacggagaaatgctctaccagctcttcggtactgacataaccctgctgtttaaccagttcgataataccgttgtgacgttgtgtttgtttcatttataaatccctggaattattttcgttttcgcgcattgaggctatcaacaaaagccatcgctaaacccacggctaacccggcgatgtgtgctccgttcgccatgctcatcccaaacaaatcaaaccatccggcgacaatccagatcagcgcaaagataattaacccacgttgcaggtaaatgccactttgcggatcgcgttcgccacgtagccagacgtagcccatcagcgcatacaccacgccagaaagcccgccaaaccacggcccgctgaatttttgctgcacatagccgcttaacagggcgctgataagcgtaatgacaattagcttaccgctaccgaggcgtttttccaccgcaccgccgagataccaccaccagagcaggttaaagaggatatgcatcaggctgaagtgcattaacgcgtgggtgaagtaacgccagaactcaaatttcagtgttggatcgaatggccaggccagccataacatcacttcctgatcgccgagaatttgcatggcaataaacaccaccacgcaggcgatcatcatcacccaggttaccggacctgcgcgttcacgcaaggcggcaaagaaaggataacggcgataatgcaggccactgccggtatggcctgcctgccagctcgccgccagataacgcggatctgccgggttttcgagaaaacgcgccagctccgcccgtacgcgctcggcctgggactcatccgccagccagacatcgctttggttatgttgttgaatcgtgaggataacaccctgcgtcgccatgtaatcaacaaacgcctgcgccacgcgggggttagcaaaagaggtaatcatcaacatcgttgctgtcgcttattccacacaaaaggggacagtataaagcgttacgcgccgtacgccacctctgcgggaaactgacgttgccaggcttcaaagccgccgtcaatgctatagaccacatcgtagccctgttgcagcagatactgcgccgcgcctttgctgctattgccgtgataacacatcaccatcaccggagtgtcaaagtcgttatcacgcataaaagcgcccagcgtgtcgttggttaaatggaaagcctgcaccgcatgtcccattgcgaaactctgtggatcgcgaatatcgaccagcaccgcctctttttcctgcaacttctggtgcgcgtcggcaacgttaatacattcgaactgatccatgcgtctctctttctttacaaacaagtgggcaaatttaccgcacagtttacgtcgaagcggcagataaacgccataatgttatacatatcactctaaaatgttttttcaatgttacctaaagcgcgattctttgctaatatgttcgataacgaacatttatgagctttaacgaaagtgaatgagggcagcatggaaaccaaagatctgattgtgatagggggcggcatcaatggtgctggtatcgcggcagacgccgctggacgcggtttatccgtgctgatgctggaggcgcaggatctcgcttgcgcgacctcttccgccagtagtaaactcattcacggtggcctgcgctaccttgagcactatgaattccgcctggtcagcgaggcgctggctgaacgtgaagtgctgctgaaaatggccccgcatatcgccttcccgatgcgttttcgcctgccacatcgtccgcatctgcgcccggcgtggatgattcgcattggtctgtttatgtacgatcatctgggtaaacgcaccagcttgccgggaagtactggtttgcgttttggcgcaaatagtgtgttaaaaccggaaattaagcgcggattcgaatattctgactgttgggtagacgacgcccgtctggtactcgccaacgcccagatggtggtgcgtaaaggcggcgaagtgcttactcggactcgcgccacctctgctcgccgcgaaaacggcctgtggattgtggaagcggaagatatcgataccggcaaaaaatatagctggcaagcgcgcggcttggttaacgccaccggcccgtgggtgaaacagttcttcgacgacgggatgcatctgcctagcccttatggcattcgcctgatcaaaggcagccatattgtggtgccgcgcgtgcatacccagaagcaagcctacattctgcaaaacgaagataaacgtattgtgttcgtgatcccgtggatggacgagttttccatcatcggcactaccgatgtcgagtacaaaggcgatccgaaagcggtgaagattgaagagagtgaaatcaattacctgctgaatgtgtataacacgcactttaaaaagcagttaagccgtgacgatatcgtctggacctactccggtgtgcgtccgctgtgtgatgatgagtccgacagcccgcaggctattacccgtgattacacccttgatattcatgatgaaaatggcaaagcaccgctgctgagcgtattcggcggtaagctgaccacctaccgaaaactggcggaacatgcgctggaaaaactaacgccgtattatcagggtattggcccggcatggacgaaagagagtgtgctaccgggtggcgccattgaaggcgaccgcgacgattatgccgctcgcctgcgccgccgctatccgttcctgactgaaagcctggcgcgtcattacgctcgcacttacggcagcaacagcgagctgctgctcggcaatgcgggaacggtaagcgatctcggggaagatttcggtcatgagttctacgaagcggagctgaaatacctggtggatcacgaatgggtccgccgcgccgacgacgccctgtggcgtcgcacaaaacaaggcatgtggctaaatgcggatcaacaatctcgtgtgagtcagtggctggtggagtatacgcagcagaggttaagcctggcgagctaaattaacgtaaggtgatcaggtcagatttcaatctggcctgagactgatgacaaacacaaaactgcctgatgcgctacgcttatcaggcctacgtggtttatgcaatatattgaatttgcatggtcttgtaggccagataagacgttcacgtcgcatccggcatgaacaaagcgcactttgtcaaaaatctaacctactttttaattcagggaattaccgcaaagcccacgccatcatacccaacgtaacaaaactcaggcacgttccccactcgcccgctgaaaaatagcattaatgcgcccagcgccagcataaaaattttgagcagaaggtaaattgttggcgtgataaggatattacaaacttcaataataccggcaagtccgacacccagcatggcaataaccaccgccaaaaattgcgccagtatggggatgccgaaaaaagtcattaccaggctggtcaaaatccattttctgttttgcattattctttccattctttttgaatggtgaaattatactccccgagtccccttgccccttctggacacttttccgaaatgatggcggaaaaaaacgggaccctttggccccgttctatttattggtgaacttacaatctcaccggatcgatatgccagatatgatcggcgtactctttgatagtacggtcagaagagaagtagcccatattggcaatgttcagcatcgcttttgcggtccactcttcctgaagctcgtagagttcatcgactttatcctgacaatcgacatagctgcgataatccgccagtacctggtagtgatcgccgaagttgatcaggctatcaaccagatcgcgatagcgacccggatcttccggactgaatacaccgctgccgatttgcgtcagcacctgatgcagctcctcatctttctcgtagtattcacgcggtttgtagccctgacgacgcagttcttccacttcttccgctgtgttaccaaaaataaagatattgtcagcaccgacatgatccagcatctcgacattcgcaccgtccaacgtaccgatagtcagcgcaccgttaagcgcaaacttcatgttactggtgccggaagcttccgtccctgccaggctaatctgttcagacagatctgccgccggaatgatcaactgcgccaggctaacgctgtagttcgggatgaacacgactttcagcttatcgccaatctgcggatcgttgttgatcactttcgctacgtcattgatcaaatgaataatgtgcttcgccatgtaataggcgctagccgccttaccgccaaaaatattcacgcgcggtacccacttcgcatccgggtcggccttgatgcggttatagcgggtaatcacatgcaacacattcatcaattgacgtttgtattcgtgaatacgtttgatttgtacatcgaacaacgcctttggattcaccaccacattcagctgctgggcgatatactctgccagacgctttttgttctccagcttcgcctgatgcacagcgtgattaaccattgggaaatcacagtgttgttgcagctcattaagcaggctaaggtcggtgcgccagttacggcccaggtgttcgtccagcacggcactaaggcttgggttcgctaccgccagccagcgacgcggcgtcacaccgttggtgacgttggtgaaacgacccgggaagattttcgcaaagtcggcaaacaagctttgcaccatcagattagagtgcagttcgcttacaccgttaactttgtggctcacaacaaccgccagccaggccatacgcacacgacgaccgttggattcatcaatgatgctcgcccgtcccagcagatcggtatcgttcggatactgttcctgcaaggttttcaggaaatagtcgttgatttcaaagatgatctgcaggtgacgcggcagaattttacccagcatatcaaccggccaggtttccagcgcctcgctcatcagcgtgtggttagtgtaggagaagacctgacaacacacctcaaacgcgtcgtcccagctaaattggtgctcatcgatcagcagacgcatcatctcaggaatgctcagtaccggatgggtatcattgagatgaatcgcgattttatccgccaggttatcgtaggttttatgcaactgataatggcggcttaaaatgtcctgaatggtgctggaaaccaggaagtattcctgacgcaggcgcagctcacgcccggagtaggtggagtcatccggatacagtacgcgagatacgttctcggagtggtttttatcttccactgccgcgaagtagtcaccctggttgaatttaccgaggttaatttcgctactggcttgcgcactccacaaacgcagcgtgttggtcgcgtcggtgtcgtaaccagggattatctgatcgtaagcgactcccagaatctcttcggtttcaatccagcgcgtttttttaccttcctgctgaatgcgaccgccaaaacggactttatagcgcgtgttgtggcgtttgaattcccacgggttaccgtattccagccagtagtctgggctctctttctggctaccgttaacgatgttctgcttgaacataccgtagtcatagcggatgccgtaaccgcgccccggcaaccctaacgtcgccagagaatcaaggaagcaagccgccagacgtcccaggccaccgttaccgaggcctgggtcattttcttcatcaatcagctcttcgagatttaaccccatcgcttccagtgcgccctgtacatcttcgtaaattcctaggctcaacatggcgttggagagcgtacggccaatcaaaaactccatgctcaggtagtaaacctgacgagtttcttggctcaactgggcacggttactacgtaaccagcgctccacgagacgatcgcgcacagcaaataacgttgcgttcagccattcatgtttattggcgacgaccgggtcctttccaatcgtaaacatcagcttgtaagcgatagagtgcttaagagcttctacgctaagcgtggggctactatatgtaaacggagcattcatataggcgtttcctgaaaattatttcaagcgatagtaaagctcacggtagctcttcgccgcgacctgccagctaaaatccattgccatagcctgacgttgcacaaaccgccacagactaggacgggaccacagtacaaaagcacgtcgaatagcccgtaacaggctccaggcattactatcttcaaagacaaacccactggcgacgccatctgcaaggttctcaagagaacagtcagaaaccgtatcagcaagcccaccggtgcgccgcactaacggcagcgtaccgtacttcaatccataaagttgcgttaagccgcacggttcaaaacggctgggcaccagaatgacgtccgcgccgcccataatgcgatggctaaatgcttcgtgatagccaatctgaacgcccacctgaccggggtattccgctgccgccgcaaggaaaccttcctgcagcaccggatcgcccgcgccgagtagcgccagctgcccgccctgctccagaagacccggtaaggcttccagcaccaggtcgagacctttctggctggtcagacggctcaccactgcaaaaagcggcactttatcgtcaaccttaagccccattgcgatttgtaactggcgcttattttccgctttatcttccaacgtatcgcgggtgtaacggctggccaacagtaagtccgtctctggactccagattttctcgtccacgccgttcagtacgccggaaagacgcccttcacggtgacgctgttgcaacagaccttccataccgtaggcaaactgcggttcggtgatctcgcgagcgtaggttggactgaccgccgtaatgtgatcggcatagtacagaccggccttcaggaaagagatttgtccgttgaattccagcccatgaatattaaagaaactccatggcaattggatgtcattcatgtgatgtgcataaaacatgccttgataggccaggttgtgcacagtaaacacgctcttcgccggacgcccgcgcgccgccagatacgcaggcgcaaggcctgcatgccagtcgtgcgcatgcaccacatcaggacgccagaatgggtcaagcccgctggccatttctgccccaacccaccccagcagcgcaaaacgcaatacgttgtcggtataggcaaataagttggtatcgtgatacgggcttcccggacgatcatagagatgcggcgcgtcaatcaggtaaatgccaaccccgttgtaatgaccgaacaacagcgtgatatgtccggcgaaggtatcacgacgggatactacctgcgcatcggtcacgccacggcgaatatcgggaaatgcaggcaacagtacgcgagcgtcaacgccgtctgcgatttgtgctgcgggtaatgccccaataacatcagccagaccgccggttttaagcagcgggaacatctcactacatacatgtaaaacctgcattatcgctcctgtttatgccctaacttccgtagcatttcgcgcgttaccagcacgatgccttcttcactacgatagaaacgacgtgcatcttcctctgcgttttcaccaatcaccatgccttccggaataacacaagcacgatcgatgacgcagcggcgcagacggcagctgcgacctacccatacttccggtaacaatacggcggaatcaatgttgcagaaactattcacgcgaacgcggctgaacagaacggactgcaccaccacgctaccggagatcacacaaccgccggaaaccagactgttaagggtcatcccgtggctaccggagcgatcctgcacgaatttcgctggcggtaaactttcattgtaggtgcgaattggccaattgcgatcgtacatatccagttccggcaccacagaggccagatcgaggttcgctttccagtaagcttccagcgtacccacatcgcgccagtacggctcggcatccgggtcggattgtacgcaagagagcgggaacgggtgcgcataggccagaccggcttcggtgatcttgggaatcaaatctttgccaaagtcgtggctggagttctcatcgcgatcgtcttcttccagcagttcatacagatagtcggcgtcaaagacgtagatacccatactcgccagagatttgctcggatcgttcggcatactcggcgggttagcaggtttttcaacgaattcgataattttatcgttctcatcaaccgccataacgccaaatgcggaggcttcttcaatcggtactggcatacaagcaacggtgcaacgtgcgcctttttcgacgtgatcgataagcatacggctgtagtcttgcttgtagatatggtcgcccgccaggatcaccacgtattccgctttataacggcggataatgtcgaggttttgggtgaccgcatctgcggtgccgcgataccagttttcccctttcattctctgctgtgctggcagcagatcgacaaactcgttcatttcttcattgaagaaactccagccgcgctgaatgtgctgcaccagagtgtgggactggtactgggtgatcacgcccatacgacggatcccggagttgatgcagttagacagcgcaaagtcgataatgcggaacttaccgccgaagtgtacggccggttttgctcgcttattggttaaatccttcaggcgggtaccacgtcctcccgccagtatcagggcaacagatttcaatggcagctggcgcgccaacattaagtgatcgttcttctctaaactaaccatgactaactccttttttatcatctctggaacacacacaatccgtgtgcaggtccctgccagacagccgtaatcactgggttatcctctccagcgaatgggggaatggcgtgccactccccagcaggtaaaacaatctctgttacctcaagcgtggcgttaattgcgatcaaaaagcgatcgctgagcagaatttgcagctgtttcggcccgttttgccactcatccgtgcttaaaggttgagcatatcgatttagccaacggacattgccgtcgccttcttcccaccagcgattctccaccaaagcgggaatgcgcttgcgcagatggattaacgcggcggtaaatgcggttaaaccactgcttgcctggctccagtccaaccaggttaattggttatcctgacagtaggcattgttattgccatgctggctgtgaccatgttcgtcaccggccagtaacatcggcgtaccctgggagagcaacaacgttgttaacagggcgtgaatgctgtcgcgccgccgttcaaccaggtcaagagaaccgcctaacccttctttaccatgattgttactgtaattgttgttggtcccgtcgcgattttcttctccgtttgcttcattgtgtttatggttgaagcaaacgcagtcgcgaagcgtaaaaccgtcatgcgcggtgacgagattaatcgcggcactcggcagacgaccattacgtttaaaaacatcgctggaggcagcaaaacgcccggcaaacgcccccagaggcaaatcataatgtagccagaaacgacgggcagcatcgcggaaatgatcgttccactcggcaaacagcggcgggaaatttcccacctgataaccaccaggagcgatatcccacggttcagcaattaacttcacctggctgagcaccgggcagttctggatagcggtaaacaacggcgcatcctgacggaactctggcgtacggcccatgactgccgccagatcaaagcggaaaccatcgacgtggcaggtttctacccaataacgcaggcaggcgctggcataatccaccaccgccggatgactcaaattgagcgtgttgccgcaaccggtccagttgtgataatcgccgtcttctcttatccaataatagctacggttatcgatcccacgcaggctgaataacgggccgtcgaggtccagttccgcactatggttgagcacgatatcaagaatgacttcgatacccgctttatgcagtgctttgattgcatcgcgaaactcatccagcgccgtttctgggctgcaggcatacgccggatgcagcgcaaacatcgccaccgggttgtaaccccagtagttacttagccccatgcgttgcagacgtggttcactggcaaactgcgccactggcagcagttccagcgcggtaatgcccaattgtttcaaatagttgatcatcaccggatgcccgagggctttataagtgccacggatctcgaccgggatctccgggtgcaagtacgttaatcctttgacatgggcttcataaatgatggtgctgccccacggcgtgcgcggcggggcatcatcttcccagtcatagtgatcaaccaccactacgcatttcggcgcaatggcggcgttgtcgcgatagtcaggttcattatgaccggcgtgcagcagcgggttatctttaaactccccgtcaatttgccgcgcgcaaggatcaatcaacaacttcgccgggttaaagcgatgcccctcggcgggttgccaggggccatgaacgcgataaccataacgcaaacccgggcgcgcatccggcagataaccgtgccaaatgtcgccactgtgccctggcaagtcatagcgatgttcctggccattggcgtcaaagacacacagttctacccgctcggcatgagcggagaaaagtgtgaagttgacgccctgaccgtcgtaatgcgcgccgaggggagcgggtttgccaatggcgagttgtgtcattctgcctcccgaaccagccagatagtggccagcggtggtagcgtcaggcttagactatgctgacgaccgtggctggcaatctcatcgctgtgtaccgtgccgccattgcctgcattactgccgtgatagtgcatggaatcggtattgaggatttcacgccatttgcccggctggtttatgccgaagcgataatcatgacgcggtaccggcgtaaagttactggcaacgatgatttcgttaccctctttatcgcgacgcacaaagatcagcacgctgcgttctttgtcatccaccaccagccattcaaagccgtacgggtcaaaatccagttcatgcattgctttatggtggcggtaggtgaggttcagatcgcgcaccagacgctggacaccgtggtgccagttatcgccgccttccaacagatgccagtcgaggctggcgtcatggttccactcgcggccctgggcaaattcgttacccatgaacagtagtttcttgcccgggaatgcccacatccagccatagtaggcgcgcaggttcgcgaatttctgccatgcgtcgcccggcatgcggtcgagaatgctttttttaccgtggaccacttcatcatggctcaacggcaggacgaagttttcagtgtagttgtagagaatcccgaaggtcagtttatcgtgatgatactgacgataaaccgggtcgagcttcatgtagtccagggtgtcatgcatccagccgaggttccacttgtaccagaagcccagaccgcccatatcctgcggacgagaaacgccagggaaatcggtagactcctcagccattgtcaccgcaccggaaacctgctcaccaagaatacggttggtattacgcaagaattcaatcgcttcaagattctcgcgcccgccaaattcgttcgggatccactccccctctttacggctgtagtcgcgataaatcatactcgccaccgcatcgacgcgcagcgcatcaataccaaaacgttcaatccagtaaagcgcgttaccgacgaggaagttactgacttcacggcgaccatagttgtagatcagcgtgttccagtcctgatgatagccttcacgcggatcgctgtgttcatacaagttcgtgccatcaaattcggcaagcgcaaagtcatcagtcgggaagtggcctggcacccagtcgagaatcacgttcagaccagctgcgtgtgcggcatcaatgaaataacggaagtcgtcgcgagtaccaaaacggcgggttggcgcatacaggccggttggctgataaccccaactgccatcgaagggatgctcgttaatgggcagtagttcgaggtgggtaaagcccatccatttagcataaggcaccagttgatcggccagctcgcggtagctcaaccagaaattgttgtcggtgtggcgacgccaggaacccaggtgaacttcataaatagagattggcgcatcaaactgattcgcttttttgcgctcttcagtctgtacaaccttttccggcagcccgcaaataagagacgcggtttccgggcgcatttgcgcttcaaaggcataagggtcggacttcagacgcaagttgccattggcatcaatcatctcgtatttatagagctgaccgttatgcgccccagggataaacagttcccagatgccgctctctttacgcaggcgcatcgggtgacggcgaccgtcccagtagttgaattgcccaaccacgctgacccgacgggcgtttggagcccagacagagaaacgcgtacctgtgacgccatccatagtatctgcatgcgcgcctaaggtttcatacgggcgcaggtgagtaccttcagataatagccaggcatccatttcctggattagcggaccaaaacggtaaggatcatcaatcaggttttgctgaccatgccagacaacagccaactgatagcggaaaaaattcttacgtcgcggaatgacgccgctaaagaatccccgactgtcgagacactccagttttgcgagtttgcgcccggttttcggttcaatcacccacacatcggtagcgtcgggtaaaagggcacggacttccagtcccgcggtggttttatgcattcccagtacggaaaaaggatccgcaaaatggcctgcaattagcgcgttaatcacgtctctatcgatacgatcggacatgcttgtcttcctgttttattgtgtcaccccatccaattggatttttgacttctggttgtgacatttttttgacctgaacggcgcagcactctgtgcatcctctctgcgtcgtcctcacttcaggtaaggctgtgaatactcatgtattcagccacccttaaagaatagccaatgctctatttaactcccggtaaatcatgaaacatctgcgcttactcctgtattacgcactaacaggggcggcatcgcgccccagatttaatgaataaagattacgccagttgacgaagcatccgacgcagcggctccgcggccccccacagcagctggtcgcccacggtaaaggcactcaggaactctggtcccatattcagcttacgcaggcggcctaccggcgtggtcagcgtgccggtaacggcagctggggttagctcacgcatagtgatttcccgatcgttcggaacgactttcgcccacggattgtgcgcagccagcagttcttccacggtcggaatagacacatcttttttcaatttaatagtgaatgcctggctgtggcagcgcaatgccccgacacgcacacataaaccatctaccggaattacggaagatgtgttgaggatcttgttggtttccgcctgccctttccactcttcgcggctctgaccgttatcgagctgtttgtcgatccacggaatcaggctacccgccagcggcacgccaaagttatccaccggcagctcaccgctacgggttaaggttgtgactttgcgttcgatatcgagaatagcagaggacggggtcgcgagttcatctgccacatggccatacagatggcccatctgggttaataactcacgcatatgtcgcgcaccaccgccggaagcggcctggtaggttgcaacggacacccaatcaacaagatcattggcgaataaaccacccaagctcatcaacatcaggcttacggtacagttaccgccaacaaaagtcctgatgccattatttaatccgtcggtaatgacgtcctgattgacggggtcaagaatgatgatggcgtcatctttcatgcgcagagagcttgctgcgtcaatccagtaaccttgccatccgctttcacgaagctttggatagatttcgttggtataatcgccgccctgacaggtcacaatgatatcgagggcctttagcgcctccagatcaaaggcatcctgaagtgtgccagtggttccgccaaaagacggcgcagcctggccaagctgagaagtagaaaagaagacagggcgaatggcgtcgaagtcgcgctcttcaaccatgcgttgcatgagaacggagccgaccataccgcgccagccgataaaaccaacatttttcataagcgtttttttcctgcaaagatgtgtgctgtataaatgtgccggtctcctcttggcacatctttcaccatacaaaaagcagccaaagtcgcaagtgaaattaatcaatgatagcgaagccatcagtaatgcgacttatcctgctttgttagcacgcagaaagtccgcggcaattatcagggaatttgagttatgaatgaaatcatttctgcagcagttttattgatcctgattatggatccgctcggaaacctacctattttcatgtccgtactgaaacatactgaaccgaaaagacggcgggcaatcatggtgcgagagttgcttattgctctcctggtgatgctggtgttcctgtttgcgggtgagaaaattctggcatttcttagcctacgagcagaaaccgtctccatttctggcggcatcattctgtttctgatcgccattaaaatgattttccccagcgctagtggaaatagcagcgggcttccggcaggtgaagagccatttatcgtgccgttggcaattccgttagtcgccgggccgactattctcgccacgctgatgttgttgtctcatcagtacccgaatcagatggggcatctggtgattgctctgctgctggcctggggcggcacctttgtcatcctgctacagtctagcctatttttacgtctgctgggcgagaaaggggtgaacgcacttgaacgcctgatgggattgattctggtgatgatggcaacccagatgttcctcgacggcattcgaatgtggatgaaggggtaacgaggagagtttttcgaaaagaacccggtagcgtcacaactaccgggcgaacaaacttaactcaacagctggaacgcaatcatcccaacgatggcaccgacagtgccgaggatggtttccatcatggtccaggttttcagcgtttcggcttcggtcgcgccggtaaatttaccgaacaaccagaaaccggcgtcgttaacgtggctgacaacaatgctaccaccagcgatacaaatgctcagcgccgccatttgcgcaccggagtagttcagttgttcaataaccggcatcaccagtcctaccgccgttaaacaggctacggtggcagaaccctgaatgatgcgcactgcagctgccagcacgaagcaggtgatagcaatcggcaggcccatgccggttaacgcttcgcccagtgccggacctacgccagagtcaaccagcacctgtttgaacacgccgcccgcaccaatcaccagcagaatgatccccgccggttgcagcgcgtgaccgcaaatctccatcactttgtcttttggcatgccctgacgcattgccagaccgtaaatcgccaccagacaagcaaccagaatcgcggtaaacggatgaccgataaactcaaaccattcgtaagcagtacttccttccggcacaaaacgcgcggcaatggttttcagccctaccagcaccagcggcagcaggatcaggctcaggctgaatccgaaagatggcattttgccttcgccgagatgcggttcgctgatgtcgtcaggaatatgcagctcaacgtaacggctgatgaagttaccccacagcggcccggcaataatcattcccggaattgccgcacacaggccaatcaggatcatccagccaaagtcggcattcatctggcttgccagcagcatcggcgctggtccaggcaccagaaatgccgccgctgccgccacgcctgcaaataatgggattaccagcttcaccaggttcgtaccggtgtggcgcgccatactgaaagcaacgctaatcagcagaactatcgccacttcaaagaacagcggtagcgcacagaccagccccgcaaggccgatggcataatgcgcgcggctgtgaccgaaggatttgagcattttgacggcaatctgatcgactgcgccggtttcatgtaagatcttgccaaacatagctcccagggcgacaaccaccgccaggaagccgagggtgcctcccatccctttttccatcgtcgctgcgattttatcgagcggcataccagaaaaaaggccagcccccatggacaccaccattaaagccaggaaagcgtgcatacgcgccttcatgactaaaaacagcagcagtaaaacagaccctactgctgttaaaacaagcgttaatgtagtcactacttatttgccttttttaataacctcaatggtgcttgccacaacaccttccagcggttgatcgatatccaccaccagtacatcggtttcgtccgcacccggctcctgcagcgtttcaaactgcgtcaccaacatttgggttttaaagaaatggcctttgcgcgctttcaggcggatttcaatcacatcaaaatcgcctttcaaatagatgaaagagagattcggattaccttcacgcagcaagtcgcgatagtgttttttcaatgcagaacagacgatcaggctcactttattagtgcgctgcatagcaaacgcggcgtcgttcagcgcctgcaaccacggtttgcgatcgtcgtcattcagtggttcgccagacgccattttttcgatattgcgccgtggatggaggaaatcgccatcaagaaacgcggcatgaagttgatgcgccacttcactggcgaccgcagatttgccgctgccgcttacgcccatcaagacgtaaatgtggtgatcatggttagtcgtgctcaaagtggtgcccccacaatacaagaattaaaaatgttacgggtaactgttatcggtaacattgtccagccggacaatatcagaagcaatatccatccatgccttaagtgtataagtgtgagctacttcaaatttgtgggcttaaatagatccgcccggactcaaggtgaaacctaaatctaacattttcggtgtcacagattcgccacgaatacgcgccagcaggcgttcagcgccaatactgcccatccgctcacgcggcgtcagcacgctcgcaagtcgtggctccatcacctgaccaatgtcatgaccgtggaaaccggcaatcgccatatcgtcaggaacttttaaccccagacgctgacattcaaacgccgcgccgaccgccaggtcatcattcgtacagaacacgccatccagctgcggatattcccgccgcgcctggcgaatcagttcaataccggaagagtaagaagaagattgctcaaccatcacgctatatggcaccaggcctgcatccagcatcgcctgttcgtatcccttctgtttgatgatagtacgttcgtcgagacgtgcgccgagataggcaatgtggcgatgcccgcgagcaataatggcagtggtcatctggcgtgctgcttcaaagttatcaaaaccgacggcgatatcaaggcatgggctcttgctgtccatcagttccaccacgggaatacccgccacttcaatcatctttaaggtgcgcggcgtgtgggtacgttcggtgaggatcaggccgtcgatattccaggagagcatggattcgaggcgttcttgctccatttccggtttataaccgtagtgcgccagcatggtctgataaccgtgcgcgtcggtgacgctttcgattccgcgtaatacttccgcgaaaacctggttggtgagagaaggtaacaggacgccaatcgcccggctggtggcgttagagaggatatcgggcgcacgattgggaatatagcccagttcatcaagagccgcggcaatcttgccgcgtagagcgacggaaacctgctccgggttgcgtaaaaaacggctgaccgtcattttggtcacgcctacacggtcagccacatcctgaagtacgggtcttttctttttcatcgtcctgaaggtacaaaagagatagattctcttagtttaacacggacacatcagaaccttcccggggaaaacagtgcttgtttacaattattagatatacactaaatcaattgcatcgcattgtgctaacgacgcggcaaaaccccggaagcgtacatcagcacgcgaccggagcgagcgaggaagcctgcaaaaaggcaggcttcaaagatgccgttgagttttaaaccggcggcagatcgaacagtaacacttcgctgtcgctatccgcatggatggagattgcctgctcatcccagattgccagaccatcgctggtgctggctttcacgccgttaatggtgacattgcctttcaccacctggatccagacgcggcgttcagcggcaatctgatgcacgctctgctcatctttcagcaacgcccagcggtacagttccatatcctgatgcactttcaaactaccatctcgcgcatccgggctgagcaccagctgtttgccctgtacggcatcgaagcgacgctgttcataacgcggcgtaataccgttttcttcaggcatgatccagatctgatacagatgcagacgctcggtgctgcttgggttgtactcactgtgacgaatacccgtaccagcactcataatctggaactcacccgccggaacctgctctttattgcccatgctgtcctgatgctcaacagtaccttccagcacgtaggtcaaaatttccatatctttatgcgggtgagtgccgaagccctgccctgcttcaatcacgtcgtcgttaatcacgcgcagcgcggagaagcccataaagttcggatcgtaatagttggcaaaagagaaagtatgccaggagtccagccagccatgatttgcatgaccacgttcatttgctttgcgtaagtagatcatttgtattcgccccctgaatgatttcgatgggcttagtgtggacccgatctgcctgggatgatagagggtgaaaattgacccctctgttcaaaaaaattgaactattcgaggggccatcaaacttacttagcgagagttactgtggagggagaggcttgctcaaatccgcgttcaaggatttccagattggtaagaacttcagattccttgacgtaatttggcgcaccgtgggtgatggtttgatacaacgcatcataaacgcgcccgtaatcgcccatctccggcttcatctcttctctgaccgtcacgccctcgtcattgacatactccagcacaccgacgctatcatccgctgcgaatcccggttcgcccggcataatattagccttcaggctggtttcctgctggtcgataccgtatttaataaagctacctttcttaccgtgaacgataaatttcggataatcgattttcaccagatggctggttttgacgatggctttcaggtcgccataaaacagttgcgcttcaaaggtgtcgtcaggattggctttattacgcaggctgcggatgtcataagcgacgtgatccgggcgaccgaacagagaaataatctggtccatcgtatgcacaccaaggccataaaacgcgccatcctgcggcagcccaggtttggtttctgccaccgggcggtaatagtcaaaatggctttccacttcaacaatctctcccaacttgccactttcaatcgcttttttcgctgtcaggaagcaggagtcaaagcgacgattctgatacggcgtgacggtcagccctttgcttttcgccaacgcaaacagctctttcgcctgcgcaagtgtcggagtgaacggtttttcgaccagcacatttttcccggcttccagcgcgcgtttcgcgtactcgaaatggctgtccgcgtgggtgcagacaacaaccagcttaacatcgggatcgtttagtacttcgtcgagatcgctggtgaaatggatatgggaataaatgggagcctgttcttccggcttcgcatggcgacgaaaaatatgcgcgacatgccagctatccttgcggttaagtacatacggcagatggtaacgggtggtgcttttgccgaagccaataaaggcgcagttgatgaccatgatttcgtcctttttaaggtggttatttacaccttagcgcaaagcggacgtggttcctactggagtgcgcataacgaacacaagcactcccgtggataaattgagaacgaaagatcaaaaaaaaagccagcacccggctggctaagtaatactggaagcaatgtgagcaatgtcgtgctttcaggttctccgcgagggtcttcctgatcgcgagacaataataatcattctcattcgcacttgtccaacactttttgcaaaaaaatgcatttgactcgcatttgaaagtcaatgatgttgaaagggacatttaccccaaagaggacaaaggaacaaatgctcttcccacgaagagggccgctaaccttagtaccccgccgttaaatcatccacgctgcgcgggtcggatgcgccgtacaactcaccgtccggcccaaccataatgctttgtgtactgcccatcgcctctttcagcgccactttctgaccttttgcttccagcagcttgagcgtatccgggctaaaccctttttcgacacgcagctcgtccggcaaccactgatggtggaaacgcggcgcattggtcgcttcggcgacgttcaagccataatcgatgctattcaccaccatttgcagcactgtagtgatgatccggctaccgcctgggctaccggtaaccagccaggttttaccgtctttcaccacaatggtcgggctcatgctgctcagcgggcgtttgttcggcccgacggcgttggcatcaccgcccaccagcccgtaaacgttcggtacgcccggtttggcggagaaatcatccatctggttattaagcagaataccgctctcgcccgcgacaatgcccgtaccgaaggtggtgttcagcgtataggtcaccgccaccgcgttaccatctttatccaccacactgtaatgggtagtttgattactctcataaggcgcaagcttgccggggcgaatttcgctggatggcttcgctttattgatatcaatttgatcggcaatagatttggcataggctttattggtcagcgcctgccacggtactttgacaaaatccgggtcgccaagatattcgctgcggtcggcgtaggcgtatttctccgcttctgccatgatttgcatcgcatcggcgctgccaaagccgtatttcttcatatcgaagttttccagaatattgaggatttgtacgatatggatcccgccggaggatggcggtggcatggagtaaacctgatacccgcgataatcgccgcttatcggagtgcgttcgaccgctttataggctgctaaatcttctttagtgatcaagccaccgtttttctgcatctcctgggcgatctgttccgcaatcgtgcctttatagaattcgtccgggccgttttcagcaatcatctccaggctctttgccaggttcgcctgcaccagcgtgtcgccctttttcagcggctcgccctctttccagaagatagctttactgttttcgtgattcggcaacacttcgctaccgtaggttttgagatcgtcagccagcgcgtcgttaacgataaaaccatcgcgtgccagtttaaacgcgggctgcacgactttgttcagcggcatggtgccgtatttatccagcgccaggctgaaacctgctaccgtacccggtgtgccggaagccagatggctagtgagactttttttgctgtccgggttgccctgatcatcgaggaacatatcgcgggtcgctttggcgggtgccatttcgcggaaatcgatagccgtggtattgccatttttgctgcggattaacataaaaccaccaccgcccagattccctgcctgcggatgcgttaccgccagcgcgtagcccaccgccacggcggcatcaacggcattcccgccctccttgagaatatccacccccacctgagtggcagtggcgtccacagacgctaccattccctgtttcgcgcgtaccgggtggaagacatcttcctccacaccatagctgacgggcggcgcaggaggcgcggcggcggcgctaaaacaacttccactgagcagagcagcaatggccacccggcgtaaaaacgtcggttttatcatcgttattctccagagattaaggggcaaccccagctaagcctggtatataactctgaattaatcatcgttttgtcgggaagcgagtaaacttaaaggatatcttcagaggaggatacgcgatgaaacgacttctgattcttacggcactcctgccgtttgtcggctttgcacagcccattaatactctgaacaaccctaaccagccggggtatcagatacccagccagcagcggatgcaaacccagatgcagactcagcaaatccagcaaaaagggatgctgaatcagcaactgaaaacgcaaactcagttgcaacagcagcatttagaaaaccagataaacaataattctcagcgggtgttgcagagtcagccgggggagcgaaatcccgcccggcagcaaatgctgcccaacaccaacggcgggatgttaaacagcaaccgtaatccggatagtagcttgaatcagcagcatatgctgccggagaggagaaacggcgacatgctgaatcagcccagcacgccgcagcctgacattccgttgaaaactattgggccgtaattattgggccgtaaagttcggaccaatcacgtcaatcgcatcggtacagatgcaatccacaccccagcgcagcaactctgctgcgcgctggggtttattgacggtataaaccagaatccgcagtccggcgtctttcaactgcatcactcgcgctttattgagtaacttatgattgagatgaatagagacgcagcccagccgcgcggtcagttcgcgccagtcgtcgcgccactcatccagcaacaaaccgcgcggcagttccggtgccgcctgttgtgcagcttctaaagcatcaatctcaaagctactcagcagcggcggcgtcataccggcccacagctcgcgtgccgccagcgccaccattttgcccgttaatggcccggtgccggtggtgggtttgatttcgatattcgccatcatcccgtgttcgcggcaacgttccgccacctggctaagcaacggtagcggctcacctttaaacattttgctgtaccaactgcccgcatccacgcgcagtaaatcctgccagttcagttcacccgcgacgccccagccgttgctggtacgttcgagattgtcgtcatggagcaggaagatctcgccatctttgcttaacttcgcgtcaaattcgatcatcttatgaccgtattttgccccgacgtcgatactcgccagggtgttttccggggccagcttaccgccgccacgatgagcgacgatgcggggataaggccagttactcatactcgttgtcctgtttcaccatcaaaaagatgcagctgattttccgccagatgcagccacagcgtgctgcctgccgtcgggcgctcctgatgcgccagtcgcaccaccagcttctgctcgccccagcgtccgtgcgccaggttatctgcgccgaggatctccagcgtgtccatcaccatcggtacgccgccttctgcctggctgcttagcgcaatatgttccgggcgaatgccgagagtcattttacgcccggcatactgacggtagccaccgtttagcggcagctcaataccgccgtccagttcgaaatgcgtgccttcgttattcacgcggcctgtcagcaggttcatcgccggactgccgataaaactcgctacaaacaggctggcgggcttttcgtagacttcaactggtgtgccaatctgttcggcaacaccgccgttcatcaccattactcgctgggcgagcgtcatcgcttcaacctgatcgtgagtaacgtagagactagtcgttttcaggcgacggtgcaactgttgcagttcaagacgcatctgcacgcgcagcttggcatcgaggttagagagcggctcatcaaacaggaacaccgccggatcgcgcacaatcgcgcggcccatcgccacacgctggcgctgaccgccggaaagctcgcgcgggcgacgtttgagcagaccgtccagctccagaatgcgcgccgcttctttaacgcgctcggcaatttgctgcttgcccatgccgcgaattttcagcccccacgccatgttttcttcgacactcatatgcggataaagcgcgtagttctggaacaccatcgcaatcccgcgatcttttggctccatttcagtcacgcgctggtcgttgatccagatatcgccttctgtcacccgctccagcccggcaaccatgcgcagcagcgtgcttttcccgcagccagacggcccgaccatcacgataaattcgccatccgccacatcaagggtcagcggtttaatgacctgggttttaccatcccagcttttggttactgcctgtaatttcagtcctgccatcttatttctcactatcgaccaggccgcgcacgaaggcacgctgcatcactaaaacaatcaccaccggagggataagcgttaacaacatcgccaccatcacactgttccattccgtggtgccttcgcctgtagcgatcatccctttgatccctgccacggtggtgccgagatccacatcggtaataatcaacaacggccacaaatactgattccagccgtagataaaggtgatcacaaacagcgccgccagattagttttggagagcggaaaaacgatgtcgcaaaagaagcgcattgggcttgcgccgtcgatccgcgcggcttccaccagctcatccggcagcgtcataaagaactggcggaacaggaaagtagcggtcgcgctggccatcagcggcagcgttaaaccggcgtagctgtcgagcatctgcaggttggcgatgacttccaccgtcgggaagatacgtacttcaaccggcagcatcagggtgataaaaatcatccagaagaagaggttacgtagcggaaaacgaaaccagacaatggcaaatgcgctgagcatgctgacggtaattttgccgagcgtaatgctgaacgccatcacaaagctgttaagcaacatccgccagaacggcgcgctattcgtgcctaccccgttcacccagatgttgtggatgttttccagcagatgtgtgccggggatgagcgtcatcggcgcggcatagacggcctgtttatccagcgtcgccgcgacaaacgccacgtacagcgggaagaggatcaccgcgatcccgaggatcagcatggtatggctgaatatcgtcagccacggacggttctcaatcattggtaacgcaccttgctttcaacatagcggaactgcaccaccgtcagcacgatgacgaggaacatcaacaccacgctctgtgcggcagagctagccagatccagtccggtaaaaccttcgcggtagatcttataaatcagcgtcgtggtggcctgaaccggcccgccggacgtggcggcgtcgatcaccgggaaggtgtcgaagaaggcatacaccaggttcactaccagcaggaagaaactcaccggggcgataagcggcagcgcaatcttaaagaagcggcgaatcggccctgcaccgtcgatggctgcggcttcgatcaagctacggggaatggattgcagcgcggcatagaagaacaggaagttgtagctgatttgcttccatacactggcaaacaccaccagaaacattgcctgaccgctgttttgcgcgtggttccagtcgtagccgaactccgcgagaaaatgggtgatcagcccgcgaccggggttaaacaggaagatccacaatacggcggcaacggcgggagccacggcgtaaggcagcaacattaaggtttgatagaaacggctgccgcgcacgatgtactccaccagcgccgcaaagaacaggcttaccagcaaaccgctgacggtgacaaaggtgctgaattttatcgtcgtccagaaggagtcgagatagtagctgtcatggaacagcgtgacgaagttatccaggccgacaaactggctggagaaaccaaacggatcgacgctttgtaggctgtaccacaacgcttcgcccgcaggccagataaaaaagataacggtgatgatgagctgcggcgcgaccagcagataaggcagccagcggctgcggaacaccggacgggaactactcattacggttaattcctgaactgtgccggatgcgcttcgcttatccggcctacacgcgatgccaggtcagataagcgaaacgcatccgacattacactgattaagacttcgtgcttttctcaaagcggcgcagcaactgatttccacgctcaacggcggtatccagtgcctgctgtggtgtcttcttaccggtccacacgctctccagctcttcatccacaatcacgcggatctgcggcatgttgcccagacgcagccctttggtgaacggcaacggcggcttattcagcatctgacgcgtcgcggtatccgcccctgggtttttctcataaaagccctgctcacgggtcaggtcatacgctgctttggtgattggcagataaccggttttctgatgccactcggcagcgttttctggcttcgcgaggaaatcgaggaacttcgccacaccggtatacgtttctttatctttaccctgcatcacccacaggctggctccgccgataatggcgttttgtggcgcatctttcgcatcggcgtcgtaaggcatcatgcctacgccgtagttaaatttggcgtactcgcgaatgttggcaagagaaccggaagaggcggtggtcatcgcgcaatcaccgttatagaacttctcggtggattcatccttacgaccgacgtagctgaagtcgcccttcttgttcatctcctcgagcatggcgatgtgtttcacctgctccggcttattgaactccagcaccgcgtccgtgccgtcaaagccgttgtttttgctggcaaacggcagaccgttccaggcgctaaagttttccagttggatccagccctgccagccgctggcgtagccgcacttcatgccggaggctttcagtttcgcggcatagtccgccagatcctgccaggttttcggcggctgttccgggtctaatcctgctttcttgaaggcgtctttgttgtaatagagaacgggggtgctgctgttgaatggctgggagagtaagtggcccgttttgctgtcggagtagtaaccactaaccgtcggcacaaactggctctcatcgaactgaatccctgcctctttaaacacgtcatacaccggtttaatggctttgctcgccatcatggtggcggtgccaacttcataaacctgcaaaatagccggcgcgttgccggtacgaaatgcggcaatccccgcgcttaaattctgttcgtagttgcctttataggtcggtacaattttgtaatccgggttttcggcgttaaaacgttgggccagagaatccacctctttacccagttccccttccatagaatgccagaacggaatggtcgtcactgcctgtgcattccccattaacgccagtccgagcgccagtgcactagctgtataatgtaacggtttcatcgtttatctctcttgttgtaccgaatgcgcgaattcacgcgttttatgctcgcggggtaacatgacatgctcgaattacagaaaaataacttttttgttacatttgtaagatagtaaggtgtcagaaagatgacaaggcggtgacggcgtgggtgagggaaaatgggagatggggcacggataagcgggaaaatatagaaggtctgaatcaaactctacagattgctcatcgtttcatgccggatgcggcgtaaacgccttatcaggcctacaagatcgtgcaaattcaacatattgccactcacccagtaggcctgataagcgcagcgcatcaggcaattttacatttgtcacctgtctcaaaggagtcttttgactccctatcaatcaacgtgttattacccgcctaaatacgcacttctcaccgcttcattcgccagcagcgcatcaccagtatcggaaagcactacatggccgttttccagcacgtagccgcgatccgccagctttagcgcctggttggcgttctgctcgacgagaaagatagtcatcccctgctcgcgcagctgctcgatggtgtcgaaaatttgctggatgataatcggcgcaagaccgaggcttggctcatcaagcagtagcaaacgcgggttgctcatcagcgcacgaccaatcgccagcatctgctgttcaccgccggacatggtgcccgcccgctgaatacggcgctcatgcagacgtggaaacagctcatacacccactttatgcgctcctggaactggtcgcgttcagcaaaaaaaccgcccatcgccaggttctcttccaccgtcatccggctgaagacgcgacgcccttccgggacaatcgccaccgcttcgcgcatgattttcgctgtctgccagtcggtaatgtctttatcatcaaacacaattcgcccgctggtggcacgcggatcgccgcataacgtgccgagcaaggtggttttccccgccccgttcgcgccaatcagcgtgacaatctcgccctgattgatatgcaggctcacctcatgcagcgcctggattttgccgtagtgggcgctgactttgtcaaaggacaacatgactttttccatcttatgcctcacctaaataggcacggatcacgtccgggttattacggatctgctccggcgtaccgtttgccagcggcgtcccctgattgaccacgtaaattcggtcgctaattcccatcaccagcttcatatcgtgttcaatcaacaagatagtggtgttgtgatgattgcgcagttcggcaatcagctcatccagctctttcgtctctttcgggttaagacctgccgcaggttcgtcgagcattaaaatctccggctgcgtcaccatgcagcgggcaatctcaagacggcgctggtcaccataggccaggttactcgcctgacggttggcgtgttccagcaaaccaatgcgctcaagccaggtcgcggcgcggtcgagcgcttcgctctgggcgcgacggaaggatggcgttttcaacaggccagagaacagcccggttttcagttgctgatgctgcgccaccagcaggttttcaattaccgtcatttcacggaacagacgcacatgctggaaggtgcgcaccacgcccatgcgggcaatttgctgccccggtaaaccttccaggtgctgatcgcgcagtaaaatggtgccgccggtgggtttgtagaatccggtcagacagttaaaaaccgtggtttttccggcaccgttagggccgattaagctgacgatctcctgcgggtacagttcaagattgacgttgttcaccgccagcaggccgccgaagcgcatcatcaggccgttaacagataataatggctgactcatgcctgctctcctttcgctgcgccgtttttcagcttcagttgcgggcgcgtcatgggcagcaagccctgcggacgccagatcatcatcagcaccatcaaaccaccgagcattaacatgctgtattcgttgaaatcacgcatcaactcgcggctcaccaccagcaaaattgccgccagaatcaccgcaaattggctgcccataccgccgagcaccactatcgccagcacaaacgcgctttcggcaaaggtgaaggattccgggctgacaaagccctgacgcgccgcaaacagcgttccggcaaaaccggcaaacgcggcacttatggtaaaggcagtcagcttgatacgacgcgggcttaagcccaggctacggcaggcgatttcatcttcacgcaacgcttcccacgcacgccccagcggcatccgcagcaggcggttaatgacaaacaggcttagcaccaccagcagcaacgccaccaggtagaggaagatgacacgatcggagggatcgtatttcaggccaaagaaattactgaacgtgtcccagccgccttcacgagcggtacggctgaactcgagtccgaagagtgtcggtttcgggatctgactgattccgttcgggccgccggtaatttcggtgttattgagcagcaatatgcgcacaatttcgccgaaaccgagggtaacgatcgccagatagtcaccgcgcaaacgcagcaccggaaaaccgagcaggaagcccgccgccgctgccattaatccagcaatcggcaggcaggtccagaagcccaagccgtaatagtgattgagcagcgcaaaagtgtaagcgccgatggcgtaaaaaccgccgtaccccagcaccagcagaccagaaagaccaacaaccacgttcagcccgagaccgaggataatgtagatcatggtcagggtggcaatatccaccgtcccgcgactaaccataaacggccacgccaccgcaagcaccaacagcgccacgaggaacagtttctgcttcaccgtggagccatcaatggcgggcagaataaacttcggtccggaaacgcttttcaaccctttctggaaagccggtcgcaaaagctggaagaaaaagaccaccgccgtgccgataaacacccactgccaacggacatcgctagccgtgtcgaccaccagtttggtgccatccagctccagttgcacgcccataaagacgcccgccagcacaaagaacatcgcggcagagagcagcgccattgcaatatgcatcggtttcatactttctctacctccgggcgacccagaataccggtcggcatcaccagcagcaccagaatcagcagggcgaaactgaccacatctttatattccgtactcagataggcagaagagagcgcctccgcaatccccagaatcaggccgccaatcatcgctcccggaatgctgccaatcccaccgagcaccgccgcggtaaaggctttcatcccggccataaagccgatgtaggggttaatgacgccgtagaactgaccgagcagcacacccgccaccgccgccatcgccgcgccaatcacaaaggtcagcgcaatcacccggtcggtgttaatgccaagcagactcgccattttcagatcttccgcgcaggcacgacacgcgcgacccatgcgggaatagcgaatgaaaatcgtcagcgccagcatggcgaggaaggtaacaatccagatcaccgcctgcatggtggtaatagaggcagagaagttttcgctatgccccaccacccactgaccgttaaacaggctcggcagcgccacgtcgcggctaccttcggtcaggctgacgtagttttgcaggaagatggacataccgattgcagagatgagtgcaatcaggcgcttagagttacgcaccgggcggtaagccacccgttcgatactccagccgtaggcgctggcaatgacgattgcgccgacgaatcccgcagctaccagcagccagccggtatcaatgcccatcatcatcagcgcggcgatgatcataaaactgacgtagctgccaatcatataaacctcgccgtgggcgaagttgatcatgccgataatgccgtaaaccatggtgtagccgatggctatcagcgcgtaggtactgcccagcgtgacgccgttaaacatctgctgcaagaaatacaaaaactgctcagacataaggtaacctttctaaacccgcccgcattttacgggcggtgggatgatcacttggctgccgtggaactaccgtcggcgtgccactggaagacaccaaaatcaaatcccttaagatcgcctttttcatcccagttcagcggcccaatcacggtgtttgcaccgttagcttttaaatctttcaccagcgccagcggctcatcgctgccggtacgctcaagggcagtcgccagagattgcaccgccgcgtaggtgatccagacataaggcccggacggatctttcttgtctgctttcagcgcatcaacgatgccctggtttgccggatcctggtcatagcgttttggcatagtgaccaacatgccttcggcggcatcaccggcaatgttgctcaagctcgcattacccacaccttccggccccataaactgggttttcaggccaacggaacgggcctggcgcagcatctgccccatttccgggtagtaaccgccgtagtaaacgaagtcgatgttttcttttttcaggcgggcgatcagcgcggagaaatctttctccccggcggtaataccgtcgaagaagacgacgttggcgttagccgctttcagcccgtcctgcacgctacgcgccagcccttcgccatactgttgtttgtcgtgaatgatggcgatgcgctggggcttcaccgtctcaagaatgtattttgccgccgttggcccctgggaagagtccagcccggcagtacgcataatgtgttgataaccgcgttgggtcagctccgggttggtcgctcccgggctgatcatcagaataccttcgtcttcatagatatcactcgcaggctgggtagaagaagaacacagatgaccaataacgtatttaatgccgtcattaacgattttgttggcgaccgcaacggcttgtttcgggtcgcatgcgtcgtcatattccacgccaaccagtttatcgcccttaattccccctttggcattaatgtctttaattgcctgacgcgcgccgttaaattccatatcgccccactgggcaatcgggccggacatcgcgccgacaacggcgactttaatatcgtcagccatagcggtgtgactaattgccagtgcaatcatccctgcgatgatagttttcgcattccgtttcatagtcaaaaatccccattcgtgatgttgtgttgctttgtttttatgtgttaacaaatcagactgttctttttttatactgcactgtttttgcctgtctgattaaggggttagcgcagtattttgtgataatagcgattaaaatccctatttttcagtcgattaagaacagataatattctgaatttattgatagataaacagaaaaaagtgcctttgtcagcataaaataacggcacaaagggcggaataattcactatcattcaggggattatgctggacatttttcattctctaatgttttaattttgtaattattgctgttaaaaaattaatcacctgccaaaagaaataaaaaagagaaagcctccgattaaattatttcgctacactggttccacttttgtgatttacacgggttacccatgaagctgaccatcattcgattagaaaaatttagcgaccaagaccggattgacctgcaaaagatctggccggagtattccccttccagcttacaggttgacgataaccaccgtatctacgccgcgcgttttaacgagcgcctgctcgctgccgtgcgggtaaccttaagcggcaccgagggagcactggattccctgcgcgtgcgggaagtcacccgccgtcgcggtgtggggcaatatctgctggaagaggttttgcgtaacaatcctggcgttagttgctggtggatggcggatgcaggcgtggaagatcgcggtgtgatgacggcgtttatgcaggcgctggggtttacggcacaacagggcggctgggagaagtgttaatcgtcaagtttgatttcaaaagtgatattgcctgatgcgctacgcttatcaggcctacaatgtgtgttgcaatttactgatttctttggatcttgtaggccggataaggcgtttacgccgcatccggcatgaagcaacgtactcgatattagcaatttggcggcaacccaaagttgccgattaatgattacttcgcatcggtcgccgtgccgttggcgtgccagtcaaatacgccgaactcaaagcctttcagatcgcctttctcatcccaggtcagcggtcccattacggtatccacggagttcgctttcaggtatttggcgatttcagccggatcgtcagactgattcaggcccgcctgcaaagattgcagcgcggcgtaggtggtccaaacgaatgcgccacttgggtcctgttttttcgctttgatcgcgtcaacaatgggtttgttcgccggaacctgatcgtagttcttcggcttggtcaccagcagcccttccgcactttcgcccgcaatgttagacaggctaacgttagccacaccttccggccccataaactgagttttcagccctgccgcgcgtgcctgacgcaggatttgccccatttccgggtgataaccgccgtagtaaacgaagtcgatattctcttttttcagacgcgccaccagcgtactgaaatctttttccccggcggtgatgccatcaaagaacaccacgtttgcattgcctttcttcaggccgtcctgcaccgctcgcgccagaccttcgccgtattgctgtttgtcgtgaacgatagcaatacgctgcggtttcactttctcaagaatatatttcgccgccgtcggcccctggtcggagtccaggccggtggtgcgcaggatcagctgatagccacgggcggtcagctccggcgcggttgccgctggggtgatcattaaaatgccttcgtcttcgtagatgtcagacgcaggctgcgtactactagaacagaggtgaccaatcacatatttaatgccgtcgttaacgactttgttcgccaccgcaaccgcctgtttcgggtcacaggcatcgtcatattttacgatttgcagtttgttgcctttaatgccgcctttagcgttgatatccgcaaccgcctgctctgcgccggtaaactcctggtcaccgtactgcgcaaccggaccggacattgcgcccacgaccgcgactttaatatcttctgccagagccatattgctgaatgccagcgcgatacatcctgccagtaacgctttaccctttatgttcatcctgagaatccccattcttctggttattacgtgtgttgtgatgttgtttttcagcactttatttcgttttatgcatgactacccgtgctttagcagcatactctgctaaaacatacccgatttttatgatattggaatagctattttgacagtttattaacaatctgcgtggggattggcgttttgccggaggggaaattgattattacagaggcccaaaaaacaaaaaccccggactctcatccagggttctctgcttaatagcggaaattacgcttcaatggcagcacgcaattttttcatcgcgttcttttccagctggcgtacacgctcagcggaaacgccgtaacggtcagccagttcctgcaacgtggacttgttgtcttcgtccagccagcgcgcacggatgatgtcctggctgcgttcgtccagaccctgcatcgcgtcggtcagacggtttgccgcctgctcttcccagttatcatcttcaatgccgtcggcaaagttagaacttttatcctgcagatagagcaccggagccatcggctggctgtcggaatcgtcgtcggaagacaggtcaaaggtcatgtcctgtgccgccatacgactttccatctcacgtacgtctttgctggttacgcccagttcacgggccaccatttcgacttcatcctggttaaaccagcccagacgctgcttggttttacgcaggttgaagaacagtttgcgctgcgctttggtggtcgcaactttgacgatacgccagttacgcagaacgtattcgtggatctctgctttgatccagtgaacggcgaaggagaccaggcgcacacccacttccgggttgaaacggcgcactgctttcatcaggccgatgttaccttcctgaatcaaatccgcctgtggcaggccatagcccgcataattacgagcaatatgaacaacaaaccgcaggtgagacaggatcagcgttttagctgcttccagatcgccatggtaatgcagcttttcagccagcgcccgctcctcgtcagcgctcaacatcggccacgcgttagctgcccggatgtaggaatccaggttgccaactggggctaaagctaaactttgcattttgtcagtcattcaaatcctctcaatcgatatcttctggcgcttcagtggtagcaacaactgtgccagagcttaagagcaacgaggttatcattcactgttttatcagaccgtgattttatccacaagttcaatgcaagcttgtgaataaattacgcacaaaatgtgacatagagatgaaataccgggaagagacaacggggtctctttccctgctacggaacccattgcagggaaagagtataacacgcttttattattcaggcgtaaagtggcgtaaatgttgtaccgtggcaagccacgctgccacccagccaatcatgctgcataccagcagcaatagcaggcattcatcgaaacttaagccattgatatcaaacttcgttccgaaaacctgtgccacttccgcaaccgcgctactcaatcgcagcaccagaatttcactcaaaattaaactcaacaatgcgccagaaaatcccagcagtgcgccaccatacaggaacgggcgcaggatgaatccatctgtcgcaccaatcagtttctgtacgttaatggagtcacggcgagcaaagatactcagacgcacactgttaccgatgacgaggaacacggccgccaccatcaacacgccgatcatcgcgctaacgcgcccgaccagcccggtcaacgccgccagacgggcaaaccagctgtcatccatccgcacttcgtcaatgccgttaatctgcgtgatacgatcacgcagcgtattcagactttccgtcccctggaaatcgagtttcgggatcaccaccgccactgccggaagcgggttttcttccagcatatccagcgcaccaccaaaaccagaccagttacggaactcacccagtgcgtcttcacgagaaagatagttcactttctccacgccttgctcggcctgcaactgtgccaccacgcccgcagcagcgtcatcgtccagcgttttttgcagataaacagtgatttgcggactcggataatactgcgtcgccgcctggttaacgtttttgtacaccatataacagacgctgggcagcgtcagagaaatggcgataaccatcaccgttaaaaacgtggcgaacggtttgcttttcagatcctgcaatgcgccgtggaaggcatagcgcacctgttcgttgaaaacgttggttttgcgatttaccggttttgggctggatttcgcgcgttttggtgcgttacgaccgccgtcgccactgccgccgacgcttttacggaagcgatcaagacgcccgccaaactgccgaatatgattgattgcatcgcgcttattcatggcccacgcctccatgcaagtgaccatcgctcagggtgagcatgcgataggaacgccggctgatcaggttgatgtcgtgcgttgccatcaatacggttaccccaacgcggttaaactcttcaaacagacgtaaaatgccttcgctcagcgcgtcgtccaggttaccagtcggttcgtccgccagcagtaccgcgggcttgttcaccaccgcgcgggcaatgccaacacgctgttgttcaccgccgctaagctgaatagggaagttcttcgctttgtccagtagcccgactttatccagcgccgcgctcacccggcgacgaatatcgtcaccgctggcaccggcgataatcagcgggatcgccacgttatcgtagacagtacggtccatcagtagatggtgatcctggaaaatcatgccaatctggcggcgcagaaacggaacttcacggtttttcagacgcgtgatgtcatggccgctaaaccagattttcccggcgctgggccgctcaatcccacagatcagcttcaggagggtacttttccctgcgccggaatgaccggtcagaaacgccatctcacccggctgcatatggaacgtaacgccctgcagcgcctgtctcccaccgagataagccttgctgacatgttcaaagcgaatcattgttaatcctctcgggcaaaaagtgcctctataaagtcgtccgccttaaacggacgcaaatcctcaatacgttcgccgacaccaatgtagcggatagggataccaaactggtcagccacgctgaaaattaccccgcctttcgccgtgccgtccagtttcgttagcgtgatgccggttaagccaacggcttcatggaacagtttggcctggcttaccgcgttctgcccggtgctggcatcaatagtcagcataacttcatgcggcgcttcaacgtcgagtttcttcatcacgcggacgattttcttcaactcttccatcaggtggcttttgttctgcaggcgtccggctgtatcggcaatcaggacgtcgatattacgcgctttagctgcctgaatggcgtcgaagataacagaggcggaatccgccccggtatgctgggcaatcaccggaatattgttgcgctgaccccagacctgaagctgttcaaccgcagctgcacggaaagtatcacccgccgccagcatcacgcttttaccctgctgctcaaactgacgcgccagcttaccaatcgtcgtggttttacccacaccgttgacgcccaccatcaggatcacaaacggcgctttgccttcaacattcagcggctcatcgactttcgccagaatctcgcccatctcttctttcagcaggccatagagcgcctcggcgtcacgaagctgcttgcgggatgcgccttccgtcagattggtgataattttacgtgtggtttccacacccacatcggcgatcaaaagctgctcttccagctcctcaaacagatcatcgtcgatttttttaccgcggaacaggctgataaatccggaaccgagattttctttggtttttaacaggctgcgtttcaggcgcgcgaaaaaaccttctttggtcggtttttcctgctcctgagcgatttcttccaccggctgctcttcttctgccggaggaaccaccatcaccgcctcttctgccgcttcggcagccagcgccgtttccagctcttcgtcggtaatttcttctttagccgcttcttcttccgccgcttcgacaatctctacggtttccgcttcagcctgccactcttctgggctaaccgcttcggcgttgacgtcttccggcaacggcagctcttcacgttcgatagccactggctccggcgtttcttctacgaccggttccggctgtgcaacgacttccgcttcaggctgcgctttttcactttcagcaacctgttcagtgacttccacaacgtcggcagcaaaagtttccgcctcggcttcagtatgcgcttgcggctgctcttcaacggcttgttcagaggccttcacaggctcttgcgcctgaacgatttcttctacaaccggttgttcattctgaacttctgtctctttttccggggtctgctctttttgaccaaagcccagccaggaaaaaaagccacgttttttttctttcgccatttgcgactacactcctcgctgttgcttcatggcacagcgttaacgctatgtacatagcagctaaaaaaatgatgaaatagtctatcacttaacttaattcacatcaccgcctgcaagtatgtgttatctggcggattgagcaatttatcatgaaaaaaccgaatcattccggcagcggccaaatccgcattattggcgggcagtggcgaggccgtaaactcccggttcctgatagcccaggtctgcgccccaccaccgaccgcgtacgcgaaacgttgtttaactggctggctccggtcattgttgacgcccaatgtctggattgcttcgccgggagcggcgcgctggggctggaagcgttaagccgctacgctgcgggggcaacgttgattgagatggatcgcgcggtttctcagcagttaattaagaatctggcgacactaaaagcaggcaatgcacgcgtggtgaacagcaacgcgatgagtttcctggcgcaaaaaggtacaccgcataatatcgtgtttgtcgatccaccgttccgccgtggcttgttagaagagacgataaatttactggaagataacggctggctggctgacgaagccctgatttatgtcgaaagcgaagtcgaaaacggtctgcccactgttccagcaaactggagtttacatcgggaaaaagtggcgggtcaggtggcttatcggctgtatcaacgcgaagcacaaggagaaagtgatgctgattaatattggtcgtttgttaatgctctgcgtttggggatttttaatcctcaacctggtgcatcccttcccacgcccgctgaatatcttcgttaacgtggcgctgatttttaccgtgctgatgcatggtatgcagctggcgctattgaaatccactttaccgaaagatggcccgcagatgaccaccgccgaaaaggtacggattttccttttcggcgtgtttgaactgctggcctggcagaagaaatttaaagttaaaaaataaccttattgttcgcctacaaagctgacaaagcgcgttcctttatagctcagcgtacctttatcgcccactgtcagggcgtggtactgctgggcgtcgaggcgaaacgtctgctccattcctccgctttgcggtttgaagcttgcctcatagcgtatactggtgcctgccggagtcacttcctgctggcggctacggcgatcgttaatcggtttttcccgcttgttgctcaccaccaccagcttttgctggagcggagccatatcattatcagctttttcccgtcgctgttgcataaaacgaaagcttgcggcgacgacaattaagccaatgataacaataaagaaaagaggtggtttgctcatctttatccctcatcggaaaatgcggaaataagcataccctgccagttatggtgttgtcatccgtccaccctcgccactaaactggaagcaagaccgtaggcattccgcttacgaaaaaataacgaattcaaggaactaagatgctttggagctttatcgctgtctgtctttccgcatggctatctgtggatgcaagctatcgtgggccaacctggcaacgctgggtgtttaaaccgttaacccttcttctcctgctgttactggcctggcaagcgccgatgttcgacgccattagctatctggtgctggcagggctgtgcgccagtctgctgggcgatgcgctaaccctgttgccacgtcaacgtctgatgtacgccatcggcgcgtttttcctcagccacctgctgtacaccatctatttcgccagtcagatgacgctctctttcttctggcctctaccactggtgctgctggttctgggtgcgctgttactggcgattatctggacgcgcctggaagagtaccgttggcctatctgcacgtttatcggcatgacgctggtgatggtgtggctggcaggtgaactgtggttcttccgtccgaccgctccggcgctctctgcgtttgttggcgctagcttgctgtttatcagtaactttgtctggctggggagccactatcgccgacgcttccgtgcggataacgcgattgctgcggcctgctactttgccggtcacttcctgatcgtccgcagcctgtatctctgataaaacttgactctggagtcgactccagagtgtatccttcggttaatgagaaaaaacttaaccggaggatgccatgagcactcctgacaatcacggcaagaaagcccctcaatttgctgcgttcaaaccgctaaccacggtacagaacgccaacgactgttgctgcgacggcgcatgttccagcacgccaactctctctgaaaacgtctccggcacccgctatagctggaaagtcagcggcatggactgcgccgcctgtgcgcgcaaggtagaaaatgccgtgcgccagcttgcaggcgtgaatcaggtgcaggtgttgttcgccaccgaaaaactggtggtcgatgccgacaatgacattcgtgcacaagttgaatctgcgctgcaaaaagcaggctattccctgcgcgatgaacaggccgccgaagaaccgcaagcaagtcgcctgaaagagaatctgccgctgattacgctaatcgtgatgatggcaatcagctggggtctggagcagttcaatcatccgttcgggcaactggcgtttatcgcgaccacgctggttgggctgtacccgattgctcgtcaggcattacggttgatcaaatccggcagctacttcgccattgaaaccttaatgagcgtagccgctattggtgcactgtttattggcgcaacggctgaagctgcgatggtgttgctgctgtttttgattggtgaacgactggaaggctgggccgccagccgcgcgcgtcagggcgttagcgcgttaatggcgctgaaaccagaaaccgccacgcgcctgcgtaagggtgagcgggaagaggtggcgattaacagcctgcgccctggcgatgtgattgaagtcgccgcaggtgggcgtttgcctgccgacggtaaactgctcagtccgtttgccagttttgatgaaagcgccctgaccggcgaatccattccggtggagcgcgcaacgggcgataaagtccctgctggtgccaccagcgtagaccgtctggtgacgttggaagtgctgagtgaaccgggagccagcgccattgaccggattctgaaactgatcgaagaagccgaagagcgtcgcgctcccattgagcggtttatcgaccgtttcagccgtatctatacgcccgcgattatggccgtcgctctgctggtgacgctggtgccaccgctgctgtttgccgccagctggcaggagtggatttataaagggctgacgctgctgctgattggctgcccgtgtgcgttagttatcagtacgcctgcggcgattacctccgggctggcggcggcagcgcgtcgtggggcgttgattaaaggcggagcggcgctggaacagctgggtcgtgttactcaggtggcgtttgataaaaccggtacgctgaccgtcggtaaaccgcgcgttaccgcgattcatccggcaacgggtattagtgaatctgaactgctgacactggcggcggcggtcgagcaaggcgcgacgcatccactggcgcaagccatcgtacgcgaagcacaggttgctgaactcgccattcccaccgccgaaagtcagcgggcgctggtcgggtctggcattgaagcgcaggttaacggtgagcgcgtattgatttgcgctgccgggaaacatcccgctgatgcatttactggtttaattaacgaactggaaagcgccgggcaaacggtagtgctggtagtacgtaacgatgacgtgcttggtgtcattgcgttacaggataccctgcgcgccgatgctgcaactgccatcagtgaactgaacgcgctgggcgtcaaaggggtgatcctcaccggcgataatccacgcgcagcggcggcaattgccggggagctggggctggagtttaaagcgggcctgttgccggaagataaagtcaaagcggtgaccgagctgaatcaacatgcgccgctggcgatggtcggtgacggtattaacgacgcgccagcgatgaaagctgccgccatcgggattgcaatgggtagcggcacagacgtggcgctggaaaccgccgacgcagcattaacccataaccacctgcgcggcctggtgcaaatgattgaactggcacgcgccactcacgccaatatccgccagaacatcactattgcgctggggctgaaagggatcttcctcgtcaccacgctgttagggatgaccgggttgtggctggcagtgctggcagatacgggggcgacggtgctggtgacagcgaatgcgttaagattgttgcgcaggagataaggcaaaccgatcgcaacattgagcgcgatcggtcccctcgcccctctggggagagggttagggtgaggggaaaaggcggcatcgaagccaatcagcccctatcaaccgcctttacgaatcaaataacgataaggcagtccatccgtctctttagcaaccagttcgtgttccataaaggtacaaaacccaggaatatcgcgggtagtggccggatcgtcggcgataatcagcaacgtttcgccaggctgcatattgcgcacggttttgcgcaccatcatcaccggttccgggcagcgcaggccaagcgcgtcgagtgtgtggtcagggctggaaaagagatcggtcattttcttctcatcacttaaaaaaacggcgctagtttacgccctgtgagtccgtaagcaaactaggttaacgattgcgtgaaaattaaccattgcattgtcaacgtaaagcagtatcatgcggcggctcgaaaaaagggtaagcacgttattatgttaaggtaacagacgtgtcgtacgtattgggttccctcaccccaatggttaatcaaaaaggtacaatatgaacgttttcagccaaactcaacgctataaggcgttgttctggttaagcttatttcatctgctggtgatcacctccagtaactatctggttcagcttcccgtctccattttgggtttccataccacctggggcgcgtttagctttccgtttatttttcttgctaccgacctgaccgtgcgtatttttggcgcaccgctggcccgacgcattatcttcgcggtaatgatccctgcgttattaatctcctacgtcatcagcagcctattctatatgggttcctggcagggattcggcgcactcgcccacttcaacctgtttgtcgcccgtatcgccaccgccagtttcatggcctacgcgctggggcaaatcctcgacgtgcacgtttttaaccgcctgcgtcagagtcgccgctggtggctggcaccgacagcgtccacactgttcggtaacgtcagcgacacgctggcctttttcttcattgccttctggcgtagcccggatgcctttatggctgaacactggatggaaatcgcgctggtcgattactgtttcaaagtgttaatcagtatcgttttcttcctgccaatgtatggcgtattactcaatatgctgttgaaaagactggcagataaatccgaaatcaacgctttgcaggcgagttaaaggttcgttatcagagttgtgataagatggatgaatgagccgttatggccgtttatcgaaaggaagaagtcaatgcgcaatctggttaaatatgtcggaattggcctgctggttatggggcttgcggcctgtgatgataaagacactaacgctacggcgcagggtagcgtcgcggaaagtaacgctaccgggaatcccgtcaacctgcttgatggcaagttaagtttcagcctgccagcggatatgaccgaccagagcggtaagctgggaacgcaggccaataacatgcatgtctggtccgacgccaccgggcagaaagcagtcatcgtcatcatgggcgatgatccgaaagaagatctggcggtgctggcgaagcgtctggaagatcagcaacgtagccgcgatccgcagctgcaagtggtaaccaataaagccattgagctgaaaggtcacaaaatgcagcagttagacagtattatctccgcgaaaggccagacggcgtactcttccgttattctgggtaacgtgggtaatcaactgctgaccatgcaaattacgctgcccgctgacgatcagcaaaaagcgcagaccaccgcagaaaacatcattaatacgctggttattcagtaagttttaagaactactggcggcctcagggacgtgttccggaggccgtttttttaatcgccacgtcagtaataacgcgattgcgaccagtcccgccgccgccagataaatcaccggtacgcccgcccagctcatcaccagcccagccagtggtccagtcacgccaaggcttaaatccataaatacggtgtaagttgccagcgccgccccctgattttgctgcggaaccgcttttaccgccactacacccaatgccgggaacaccaggctaaacccggcccccgccagtaagacgccgattttcgccatccacggcatagtcgccacgccaaccagtagcaggccgattatctcaacgctaaagcaaatcatcgctacgtttaagccaccgatacggttaatgccgttagggaataacaaacgcgtaccgacaaacgcacagctaaacagcgtcagcgcgaaagccgcaccgtcccaacctttagcgtcataaaacagcgtgataaaggtggcgatgacgccaaatccggcggaagccagtgccagcgccataccgtacagccagacgcgcccaagcaccgcgcgaaacggcagcggtttgcctttactggcttttaccgtcggacgcgggatcgccaacaaaatggccaccagcgccacgcccataatgattaacgctaacgcctgcaagccgccccagtgataaaacacgacgcctaacggcgcacccatcgccatcgccccgtaagtgacaatgccgttccagctaatcacccgcccgatatgcaggctgccaaccacgccaacgccccatagggtgcttcccgttccggcaaaactttgcccaatcccaaggatgacgcgccccaggcaaagtaataacaggctgatgacaggcagactggcggttaatcctgccgtcagataccccagaccgctcaaaaagcagccgcataaaccgaagacgacaatctttttgggtcccaggctatcggcgtaacgtccggcatgagggcggctcagcaaggtggcgaaatattgcaggctgataaccaatcctgcccagaaggcgctaaagcccatcacatcatggacatagcccggtaatacagcgagcggcaacccgatggtgaggtagctggcgaagttaaacatgactatagagacaatgcgcaaattcaggcgcaatccgtttagcgcgggttcggctacgggttcgggcatgaggatcaccacatttttacaacagtgtttcatttttaccacgtgctgacgtgaaaatcagcagtaagaatcagaatattgctggcgtgactcccgctacacttaatacaaaaagtcacaaggaagccccaatggaaacccctcaacccgataaaacgggcatgcacattctgctcaagctggccagcctggtagtgatcctcgcgggcattcacgcagcggcagatatcattgtgcagctgttactggcgctgttttttgccatcgtcctcaacccgctcgtcacctggtttattcgtcggggagtacaacgccccgttgccattacgattgtagtggtggtgatgctgatcgcactaaccgcgctggtcggcgtactggcggcaagctttaacgaatttatctctatgctgccgaagtttaataaggagctgacgcgcaaactttttaaattgcaggagatgttgccttttcttaatttgcatatgagcccggagcgaatgctgcagcggatggacagcgaaaaagtggttaccttcaccacagcgctaatgaccgggctttccggggcaatggcgagcgtgcttttgctggtgatgaccgtagtttttatgctgtttgaagtgcgccacgtcccttacaaaatgcgttttgcgctgaataatccacagattcacatcgcgggattacaccgcgcacttaaaggcgttagccactatcttgcattgaagacgctactcagtttatggacaggtgtcatcgtctggctggggctggagctgatgggggtgcagtttgcgctgatgtgggcagtactggcgtttttgctcaactacgtgcccaatatcggcgcggtaatttccgccgtaccgccaatgattcaggtgctgctgtttaatggtgtttacgaatgtattctggtcggcgcattgtttttagtggtccatatggtcatcggcaatattttagaaccacggatgatgggccatcgcctggggatgtccaccatggtggtatttcttagtttgttaatttggggatggctgctcggcccggtagggatgctacttagcgtgccattaaccagcgtgtgtaaaatctggatggaaaccaccaaaggcggtagcaaactggcgattttactggggccgggcagaccgaaaagtcggttaccgggatgaggcgacaagtgatacgatacgcactttcattttccattaaacgttggccctgatatgtatcggatagttctggggaaagttagcaccttaagcgcagctccactgccaccgggtttacgcgagcaagcaccgcaaggtccacgacgcgaacgctggctggcggggcgtgcattgcttagccacacgctttccccgctaccggagatcatctatggcgaacaaggcaaacctgcatttgcgccggaaatgccgctatggttcaacttaagccatagcggtgacgatatcgccctgctgttgagtgatgaaggcgaagtcggctgcgatatcgaagtgattcgcccgcgcgccaactggcgctggctggcgaacgccgtattcagcctcggggaacacgctgagatggacgccgtgcatcctgatcagcaactggaaatgttctggcgcatctggacgcgcaaagaagccatcgttaaacagcgtggcggcagcgcctggcaaatcgtcagcgtagacagcacctatcactccagcctgagtgtcagccattgtcagcttgaaaatttaagccttgcgatctgcacccctactccctttacgctcaccgccgacagtgtgcaatggatcgatagtgttaactgatccgcccacccgactgcccatctattgatccagaacaggtaatcagtatgacgaatacttaaaatcgtcatacttatttccgccatctattttaatccattggggttaccatgctctccacactccgccgcactctatttgcgctgctggcttgtgcgtcttttatcgtccatgccgctgcaccagatgaaatcaccaccgcctggccggtgaatgtcgggccactaaacccgcacctttacacgcctaaccagatgttcgcccagagcatggtttatgaaccattggtgaaatatcaggcagacggtagcgtgatcccgtggctggcaaaaagctggactcatagtgaagatggtaaaacctggaccttcaccctgcgtgatgacgtgaaattctccaacggtgaaccgttcgatgccgaggcggcggcagaaaacttccgcgcagtgctcgataaccgtcaacgtcacgcctggctggagctggcaaaccagattgttgatgttaaagcactcagtaaaacagagctgcaaattaccctgaaaagcgcctactatcctttcctgcaagaactggccctgccccgtcctttccgttttatcgctcccagccagtttaaaaaccatgaaaccatgaacggaattaaagcgccgattggcaccggaccgtggattttgcaggaaagcaaactgaatcagtacgatgtcttcgtccgtaacgaaaactactggggcgaaaagccagcgattaaaaagatcacctttaacgtcatcccggacccgactacccgcgcggtggcgtttgaaactggcgatatcgacctgctgtacggaaacgaagggttattaccgctcgataccttcgcccgctttagccagaatccggcttaccacacccaactgagtcagccgatcgaaaccgtgatgctggcgctcaataccgccaaagcccccaccaacgagctggcagtacgtgaagctcttaattacgcggtaaacaaaaaaagcctgattgataacgcgttgtatggcacccagcaggtcgccgacaccctgtttgccccttctgtgccctacgccaacctcggcctgaaaccgagccagtacgatccgcaaaaagcgaaagcgttgctggaaaaagccggttggacgctgcctgcgggcaaagacatccgcgagaaaaatggtcagccgctgcgcattgaacttagcttcatcggcaccgatgcgttaagcaaaagcatggcggaaatcattcaggctgatatgcgccagattggcgcagatgtcagcctgattggcgaagaagagagcagtatctatgctcgtcagcgcgacggtcgttttggcatgattttccaccgcacctggggcgcgccatatgatccacacgccttcctcagtagtatgcgcgtaccgagtcacgctgacttccaggcacagcaaggattagccgacaaaccgctgattgataaagagatcggcgaagtgctggcgacccatgacgaaacgcaacgtcaggcgctgtatcgcgacattctgacccgtctgcatgacgaggcggtttatctgcctatcagttacatcagtatgatggtggtaagtaaaccggagctgggtaacatcccctacgcgccgatcgccaccgaaattccgttcgaacagattaaaccggtgaaaccttaatgttgcgttacgtattacgccgctttctgctgctgatcccgatggtgctcgccgccagcgtgatcatttttctgatgctgcgcctcggtaccggcgacccggcgctcgattatttgcgtctgtctaacctgccgccgacgccggagatgctggcctctacccgcaccatgctgggactggatcagccgctgtacgtccagtacggcacctggttgtggaaggcgctgcatcttgactttggtatcagtttcgccagccaacgcccggtactggacgatatgctgaacttcctgcccgccacgctggaacttgcaggtgcggcgctggtattaattctgctcacttccgtaccgctcggtatctgggcggcgcgccatcgcgaccgtctgccggatttcgccgtacgtttcatcgcgtttcttggcgtgagcatgcctaacttctggctggcgtttttactggtgatggcgtttagcgtgtatctgcaatggctacccgcgatgggttacggcggctggcagcacatcattttgcctgcggtttccattgcctttatgagcctggcgattaacgcgcgtttactgcgcgccagtatgctggacgtcgccggtcagcgtcacgtcacctgggcgcgtctgcgcggcctgaacgacaaacagaccgaacgtcgccacatcctgcgcaatgccagcctgccgatgatcaccgccgtggggatgcatatcggcgaactgattggcgggacgatgattatcgaaaacatctttgcctggccgggcgtcgggcgctatgcggtgagcgcgatttttaaccgtgactatccggtgatccagtgctttacgctgatgatggtggtggtttttgtggtctgtaatttgattgtcgatttgctcaacgccgcgctggacccgcgcattcgtcgtcatgaaggagcgcacgcgtgaactttttcctctcttcccgctggagcgtacgcctggcgctgatcattatcgccctgctggcgctgattgcgctcaccagccagtggtggctgccgtatgacccacaggcgattgatttgccgagccgcctgcttagcccggatgcgcagcactggctgggcaccgatcacttaggtcgcgatattttcagccggctgatggcagcgacccgcgtgagcctcggtagcgtaatggcctgcctgctgctggtgctgacattagggctggttattggcggcagcgccgggttgattggcgggcgcgttgatcaggccaccatgcgcgtcgccgatatgtttatgaccttcccgaccagcattctgagcttctttatggttggcgtgctcggcaccgggctgaccaacgtaattatcgccatcgccctgagccactgggcgtggtatgcacgcatggtgcgcagcctggtgattagtctacgccaacgcgagtttgtgctggcgagtcggctttccggtgcgggccatgtgcgggtgtttgtcgatcatctggcaggcgcggtgatccctagcctgctggtgctggcaacgctggatatcggccatatgatgctgcacgtcgcggggatgtctttccttggcctcggtgtgaccgcgccgaccgccgaatggggcgtgatgattaacgacgcgcgccagtatatctggacccagccgctgcaaatgttctggccggggctggcgctgtttatcagcgtgatggcctttaacctggtgggtgacgcactgcgcgatcatctggaccctcatctggtgacggagcacgcacactaatgccgcaacagattgaactacgtaatatcgcgctacaggccgcgcagccgctggtacacggtgtaagcttaaccctgcaacgcgggcgcgtgctggcgttagtcggcggtagcggcagcgggaaaagtttaacctgcgccgcaacgctgggcattttgcccgctggcgttcgccagacggcgggggaaattttagccgatggcaaaccggttagcccttgcgccctgcgcggcatcaaaattgccaccatcatgcagaacccgcgcagcgcctttaatccactgcacaccatgcacacccacgcgcgggaaacctgcctggcgttagggaaacccgccgatgacgctacgcttaccgctgccatagaagcggtggggctggaaaacgccgcgcgcgtgctgaagctgtacccgttcgagatgagcggcggcatgttgcagcgcatgatgattgcgatggcggtgctgtgtgaaagtccgtttatcatcgccgatgaaccgaccaccgaccttgacgtggtagcacaggcgcgcatcctcgatctgctggaaagcattatgcaaaaacaagcgccgggaatgctgctggtgacccatgatatgggcgttgtggcgcgtctggcggatgacgtggcggtgatgtctgacggtaagattgtcgaacagggcgatgtagaaacgctgtttaacgcccccaaacatacagtgacgcgcagcctggtttccgctcatctcgccctctacggtatggagctggcaagttgacctaatacggtatggagctggcatcatgactttacttaacatctccggcctttcccatcactatgcgcacggtggatttaacggaaaacatcaacatcaggcggtgctgaataacgtttccctgaccctgaaaagcggcgaaaccgtcgccctgctggggcgcagcggctgcgggaaaagtaccctcgcgcggttgctggtgggtttagaaagccccgcgcaggggaatattagctggcgtggcgaaccgctggcgaaactcaatcgcgcccagcgtaaagcgttccgccgcgatattcagatggtatttcaggactccatcagcgccgtgaatccgcgcaaaaccgtgcgcgagatcctgcgtgaaccgatgcgccacctgctaagtctgaaaaaatccgaacaactggcgcgcgccagcgaaatgctgaaggcggtcgatctcgatgacagcgttctcgacaaacgcccaccgcagttaagcggcggccagctccagcgcgtctgcctggctcgcgcgctggcggtcgaaccgaaactactgattctggatgaagccgtttctaaccttgatctcgtgttacaggcgggtgtcattcgcctgctgaaaaagctacaacaacagtttggcaccgcctgcctgttcatcacccacgacttacgcctggtagaacgcttttgccagcgggtaatggttatggacaacggacaaatcgtcgaaacccaggtggtgggagagaaattaaccttttcctctgacgccggacgtgtgctacaaaacgcggtattacccgcattccccgtgcgccgtcgcaccacagaaaaggtttaacgcaaatgcaacgagtcaccatcacgcttgatgacgatttactggagacgctggacagcctgagccagcgtcgtggttataacaaccgttccgaagctatccgcgacattctgcgtagcgccctggcgcaagaggccacccagcagcacggcacgcaaggtttcgcggtgctgagctatgtgtatgaacacgaaaaacgcgacttagccagccgcattgtctccacccagcatcatcaccacgacctctccgtcgccacgctgcatgtgcacatcaaccacgacgactgtctggaaatcgccgtgttgaaaggtgacatgggtgacgtgcagcattttgccgatgacgttatcgcccagcgcggcgtgcggcacgggcatttgcagtgcttgccgaaggaagattgagttacgccattgtcccaatcgtcttcctgaatcgcagcagcgcaatggtgaaaaatgcgccgccaattgccatcagcgtcagaaactgcggccagacgatttcgaatccggcaccccggtagaggatggcctgcgcgaggctaacaaagtgtgtcgtcggcatggtcagcataatgtcctgcaccatctgcggcatactttcgcgcggcgtggaaccaccggaaagcatttgcagcggcagcagcaccagaatcaccagcagccccagttgcggcatactacgcgctatcgtccccataaaaatgccgatactcgtggtggcaaacagactgagcgccacgcccagcataaacagcgggatgctgccttcaatcggtacgcccagtacacctttcaccatcagcaccaggcttaatccgcttaccaccagcaccaccagccccatgctccagatcttcgccatcatgatctcaaacggcgttatcggcatcaccagtaagtgttccaccgtgccgtgttcacgctcgcggatcagcgcgcttccggtcaatacaatcgccagcatggtaatgttgttgatgatcgccatcaccccgccaaaccacgcgggatcgaggttcgggttaaagcgcatccgggtttccaggcttaccaacggttcgctgttatcacggtagcgcgcgacaaagctgttcacttcaccgttgataatattctggatatacccattgccggtaaatgcctggctcatgcgcgtggcatcgacgttcacctgaatatccggctggcgtccggcgaggacatcacgctgaaaattaggcggaatatttatcgcgaaggtatagcgtccggcgtccagtccggcatccatctcatcggcggtgatcatctccggtggcaaaaaccacggacgatagaagctgttaacgatccggttgcttaactggctttgatccatatcggcaatggcgatcggcgcgaggttcaagcttcctggcgtaacggtcgcactgctatacacgctcaccgtaaagctgaagacaatcagcgtcagcatcgctttatcaccgagcagactgcgcaactctttgatacccagattaaaaatattgcgtaaatggcgcatcatccctcctgttttttcagcagcaggatacttaagcccatcaccagcgggatggctatcagtaacgggataaaaagttgccacaaatcagtcagatccagcgctttgctgaacgtcccgcgggcgatagtcagaaaatgactggtcgggtaaacctcgccgatccaacgtccaggcccttccaggctagctaccggatcgatcatcccggaaaactgtgtcgccgggatcaacgtgataatcgccgttccgaaaatggcggcaatctggcttttcataaaggtggagatcagcagccccattccggtggcaatgatgatatacagcagcgccgccagggtgagcgtcaggaaactgcctttatgcggtacgccaaacacaaacacgctcaggccgcagagcaggaaaaagttcagcatccccagcgcgatgtatggcaactgtttaccaagcaaaaattcactacgcgtggtgggggtcacgtaaaggttgataatgctcccaagctctttttcccgcaccacgctaagggcgcttagcatactcgggatcatcatcagcagaagcgggatcaccgccggaacaatcgctggcaggctttttacgtccgggttatagcgatagcgcgtctcaatattcatcagcccgctttggctggcgggtgtgctttgtcggctcgccacatcctgtaaccagctctggtgcatggcctgcacgtaaccttttaccgtttcagcacggctcggcatcgctccgtcgatccagacgccgagttccacaggcgtaccacgcgcgatatcgcgcccgaaattgggcgggatctcaatcgccaccgtgatatcgcccgcacgcatccgacgatcaagctcgtcataactggtgagcggcggctgttcgataaagtaacgggaaccggagaggttgagtgtccacgcctggctactgacggtctggtcgcggtcgagcaccgcaaagcgcaggttttccacatccatactgatgccgtaacccattatcagcatcaggatcaccgttcccatcagcgccagcgtgctacgtactggatcgcgtcgcagttccagcgcttcgcggcggctgtagctaaacagacggcgcaggctaaatccctgacgcggcgcgtgggtggtgtcgtgtaccacgggcggcgcttcggcttcgttgctctgccctgccgcttcctgcaaataggcgataaatgcctcttccagactggcggctccgcgtttctcaaccagttcctgcggtgtaccgctggcaagcacttttccggcgtgcatcagactgatgcggtcgcaacgttccgcttcgttcataaagtgggtggagatgaagatagtcactttgtcctggcggctgagatcgaccatcaactgccagaacatatccctcgccaccggatcgacaccagaagtaggctcatcgaggattaacatctccgggcgatgaatcaccgccaccgccaggctaagccgctggcgaatgccgagcggcaaactctccggcagaatatcttcaacgtcgttgagcttaaaacgctcgctcatttcagccactcttgcgggaatttccgcttccgggatgtgaaacaaacgggcatgtaactcaaggttttgccgcacggtgagttcgttatagaggctaaacgcctggctcatatagcccacccgacggcgggtatcgatatcttttggatcaaccggttgcccgaacagccacgcctcaccttcgctggcgggcagcagtccggtgagcattttcatggtggtggatttaccgcagccgttgctaccaagaaaaccaaaaatctccccgcgtggaatgcggaaattaacgtgatcaacggcaacgaaggaaccaaaacgcatggtcagatcgcgcgcttcgatggcaatctctgcgttttcaggttgatacggtgggatcactaccgcctgatgcgcctggcgttgcgcttgcggtaacagatttataaatgcttcttccagcgtagcgctttgcgtttgctgccgtagctcttcggcgctgccagttgccagcacttctccggcattcatcgctaccagccagtcgaagcgttcggcctcttccatataggcggtggcgaccagcacgctcatattgctctgccgctggcgaatactgtcgatcagatcccagaactgggagcgggagagcgggtcaacccccgttgttggctcatcaaggatcaacagttccgggtcgtggattaacgcgcagcacagcccaagtttttgcttcatcccgccggagagtttccctgccggacgatcgcgaaacggtgctaacccggtgctggtcagcagctcattgattcgcacttcccgctccgctttgtcgtgaccgaacaggcgagcgaaaaaatcgacgttttcatacacgctcaaggtgtggtagaggtttttgcccagcccctgcggcatccaggcgatgcgcgggcagacgtcgcggcgatgcttcgggtcgcgcatatcgccgcccagcaccatcacattgccctgttcaatgacgcgggcaccggaaatcaagctcaacaagctgctcttcccgacgccgtccgggccaatcagcccgaccatacagcgggccggaatatcgagagtgatattgttcagcgcaacggtttttccataatgctggctcacgcccgccagttgcgcgacaggcgggacgggaaccagttccagatgcgtcattgcggcaacctcaccacgaggtcgtcaggccacggaagttcttcattcacccgcacccacgctacgcccggcaaaccggttttgacatattccagatgctgctggagtaattccggtgggatacgcgctttgacgcggaacatcagtttcagccgttcatcgctggtttcgacggtttttggcgtgaactgggcgacactggcgacaaaactgatggttgcaggaatacgcagatctggcgcggcatcgaggatcagccgggcttcaccgcccagtttcagcgtgcccgcctgttcggttggcaggaagaaagtcatatagacgtcgctgagatcgaccatattcagcacccgaccgcctgccgccagcacttcgcctggctcggcaacccgatactgcacgcgtccgtcacgcggggctttcagttcgctgtcatcgatatctgcggcaatgcgccgttcagtggcttgtgccgcttcgacgcgggtttgcgcctgaatgatattggtgcgtgccgcttctatagccgctttagaagcgcttacctgagctttcgcgctttccagcgcagctcgggcgctctcagcggcggcgcgatcgtcatccagctgttgcgcagaaatagcccctcgttgggccagactacgggaacgcgtatgacgttttgctacggagtccagttctgcctggcgttgattaaccaggctctgtgcggcacgagtttcgctttgtcgttgctccagcaaagcctgcgcggcagcaacggcgctttgtgcctctttgatttgcgcgatggcttccagtcgctgttcctgcaacacgcgagtatccatcttcgccagcacttcaccttcgcgaacaaacttgccttctttcaccagaatggtgtcgatacgcccggcaattttgctggcaatatccacttccgtcgcttcaatgcgcccattactgacagcaaagccttccggcacacctgccgggcgcaacagccaccacgccacgatagccgccaccgccagtaacccgacaacccaccacgccagatggcgcttactcttatccataatcgacccgccataatccctgtaagcaaacgacgcgtgttacaactgccgccgaacgacgttcagcggattcttccatccgggataagaaggaaacggcaaatacgaccagcgcgcagagcattgagcgccaacggggaaggcttagtgaaaacgggtagtaatgttgtcatcatcagcattcctggccgtaaatgaaacacgcatactcataagtgtgatctataaaactggctgacaaaacggtatccatcctgttggatagcgtttcacgcctgttcagttgcaggaacagagcattcctttttacgttttatcaacagtctcaaccagatagtaacattaatattcatgttgtctatggttcagagctgtaacattgtgcgccttctaatcaaaggcataagtccatttctgtttttttcatgctggtaagacttccagggagtggttatctcaggccctgcaccagggttaatttggcaattatgcatgctgaacattcttccagcatgtttactgtcacgggcgttaagacctaaaactgtccccgtttcgcctatgcgttctcttccaccatttccgttatgtgcaacaacttgatttatacctaacatttgactacatgctaatagtgcttcaagtttaggtctgtaatctgtgctaacagaaaaataacgattaaaggatcgacaagagatagcccggctagttttaaactttttgccattaattatagcatgatgctttttattgataattgccgctaattcgaccggatcgagagcattggtcatttcatcaatagagactgttatcggtcctataatgtaacgttttcgctgatcatcaaaagttatcccatgatgatttgccattattttgtatttggggtcatagaaacatacaggataatcttttatcccagagtaggtatcctcatcgagtggtttcatacgcgtgaagttctgcatatagttaccattgcaattcgtttcatgatttccagctaatacatgaacattttcattgatactcattatgcgttttaacaaatcgatgataaattgatcaccacagatattgctaaatcgatcgccggtttggtcgcccagaaacgtacatggcgtcacagcgtctttattaataactaaataaggctgaagactttctaaaataatgtctcttctgttcaggatactgattattgtattaacattagtgttaagttgctcattaaagttctcccttagcaatacgttgagaacttcatcttctatattaagcaactggctaaggaaattttctccttcagccatgattcccaaatgtcccgttgcgaaaagcgcgaacaaaactgcaccgacactgccatcggtatcaccaaaataggttggtctggtacttgtgggatcaacgggtaaacaattggagaaatagattctgtcagcgaactggggttttatcattgtttcgaatttaatatcagatacattatattggcttattttccagttccagatgggtttgtagctctcagtaactgcaacatcattagcattatcatttactgtcatattattaagtaaataaacaatactgcaccaattaatatcggtattatcaagagagcaaccgtaatttttgctattaattgtcacaataaactgataattattattcctacgtagaatatgagcacgcatgccgcttagcatactatatttttcactatgatccgtttgtatggtaaaactaattttgtcatcttgaatagattgttggaaccgttctatttgccaatcatctattttttccacaacctcaccgagcattgtcctggcaatactacttatatcatcacctataccatttgcaatatacccaaacagttctttagtgaagttggtaacatgctcttgcaccatatcatttgttgcgattgtcgttgtactgtcgttagtgcctgccacagttccaattttcatattttacctcatattatttaccgcgaggaatacatagttaacattttatcttatgacatacacctcatgttcgatgggaaaataattatattttgcacaaatcattcagcctcaaagcataatatgaaatttcttatctcatagcagagaaagtccctaaagattgtagaggcgtcatcagaacatgcctctacaatcgattaagaaaacctatgaaatactggcaggattaaaaagacataccaccgtattcatggagttttaatgtagttgaaaacaactaagcccactggaataaattattttattatttttatcacgtgcttccttcagggaatttagccccataataccattatcaaattgttgattatgatctaccccgggcccatgatgcccatatttttgtctaatgtatttgctggggtcttcacctttgagtgtctccccacatatgaagatacgttcacgtgctggtctgaaatcagtagtgttatcaaaataattagcatatacaggtgtgggtttcaaagtattgcttcggattagatggaatagaggatcatccatgtgttctttatgttttttattaaaaatattggctaattcctcaggatcagtaggatttttcatctgattaaatggaacctgcaaagcacgctgacaataacatttttttcttcatctcttattattccgtgatgactggttaaaacttgcctttcactgtcataattacaaacatcgagcgttttaattaagttatacgtatcaccggcagagagtttatgatttgctagtcgtgcagtatagttaccattaaaattgatttcatgatttccagccagaacgacgacatttttattaatacggctatctttattaccctccatatttcgcatagaatttagcaaagtaaggatatatttatcaccaaaaatagtactaaatctatcgcctgtatgatccccaaggaagatacaaggggttatcgcatcgtcctttaaaaaaacatgttgatgcaactcattcaagatcatgtctctcgtatttaataaatcgtagagcactttattatttttatgtttgtatgcagaactagccatctcttcgtgttttaataattcacataataaactccaacccttttccctgatgcctatatgcccactaacgagcaatgcataaagtacagcgcctactcttccatctgtatcgccaaaataagccgtgttggcattttgtgggttaatcacaccacactgtttatagaagtctattttactaaacacagatttaacatagctatcaaacttttccttagtaaacgtctctttagagacatcccaacgccagtcaggtttgaaattaccactaagaagagtaaagaaatttctcgctatgatagaaagcccatcaactttataaattatatcacttttatctccagaggaattaataaaataataaccgcccttacactcaacagtaacggtaatgggagagcttaattttaacacatggttattgtctggtataattgtaaagataaacgtatcagtagtattgtcggcgaatctattatattcttgaatatctatagaaggttcactattataaaaccatactttctccatctggtgactacgatcatttaccttccagtgaccatgttgcaggaaatagatgatatgcaggccaaaatcgttatctatttggctatcattatccagtttatcaaattcaactatctttgcacgatgtgttttatcaaccttgccatggtgttgatgactgttaactttatcactatgcttatcttgatggctactagagatgtttctaatctgattgtcaattgctttcataaataacctgtgatatttttgaattgtttgtaacaaaataaatgatacttgtctgaaaaacagatttacgacgatataaaataataatacttatatgttcgctgattttaagcaccgagactatccggtcttttaccaaataatgaagaataatccctccctggaagataattgtaaaaaacaacagcataagaattaatcttaggataaatttttatttatcatggccttttgaacgctgaaaagtagcgctctgcaaagtaaaccccgctatagttatgctatgcatttgtctttaatgatatctcgtcattatattaacaggatgaaattatcattaatgcatatttcaatattagcagggatacctgaggagtttaaagtgaacatatatatcgggtggcttttcaaattaatccctttgattatgggcttaatttgtatcgcgttaggtggctttgtgctggaaagtagtgggcaaagcgagtatttcgtcgcgggtcatgtgctgatttctctggcggccatatgcctggcattattcactaccgcatttattatcattagccagctcacgcgcggcgttaatacgttttacaatacattgttccccattattggctatgcggggagtattatcaccatgatatggggttgggcactgttagcaggcaatgatgtgatggcagacgagtttgtcgccggccatgttattttcggcgttggtatgattgccgcctgtgtaagcacggtggcagcgagttccggtcactttctgctcattcccaaaaatgcagcggggagcaagagcgacggaacaccggtacaggcttattctagtttaatcggtaactgcctcattgccgttcccgttttactcaccctgctcggtttcatttggtctattacgctgttacgtagtgctgacataactccgcattatgtcgcgggtcacgtattgcttgggttaaccgcaatctgtgcctgtctaattggccttgttgccacaattgtccatcaaacacgtaatacgtttagtactaaagaacactggctgtggtgttattgggttatttttctcggcagtatcacggtactgcaggggatatacgtcttagtcagttccgatgcaagcgcccgactggctcccggcattattcttatttgcctcggaatgatctgttacagcatattcagtaaagtctggctactggcactggtatggagacgtacctgtagcttagccaacagaataccgatgattcccgtcttcacctgcctgttttgccttttcctggcaagctttcttgcggaaatggcgcagaccgacatgggatattttattcctagccgagttctggtcggtttgggagcggtatgctttacgttgttcagtatcgttagtatattagaagcgggttctgctaaaaaataattgcaacgtaccggataaaaccagcgttgaccatttgcgtaacgctggtttttcttaggcatcatgaaataacgcagcattaatgcatagtggttaagtataaaaaacagcaaagttactgtttttttcaacctgttcatatttcataaagatctggccactgagtgagttttcaatcacctttccatccaccttatattaagcatggagggtttcagttcacgggctcattagaaaataatcacaagataaccactatcaaaattagctcatttttaatgcgactctaataattttcatctttaggaaataggtcaggagctctttgctgcaatcaaatcctgcgcacaagcccacgcactgctccacgcccactggaagttatagccccccagccagccggtgacgtccatcacttcgccgatgaagtacagcccaggcactttgcgcgcttccatcgtccgactagagagttcgttggtgtccacgccgccgagcgtcacttcggcagtgcgatagccttcagtgccgttgggttgtacgcgccagtcggtcaatgtgctaatcagtgcctgttggtcacgcacgttgagctgttttaggctaacatccgggatttgcccgagttgctgtaagcgttcaaccaaccgcttcggtagatgaaccgccagtgtgtttttcaggctttgattcggatgtgcgttacgctgctcattcaggaaggtttcgaggtccacatccggtagcagattgatgctgacaaattcccccggttgccagtagctactaatctgcaacaccgccggtccagacaagccgcggtgggtgaagagtaagttctcacggaaaacggtgccgttttcagcggtaatcacggaaggcaccgccacgcccgccagcacctgtaactcttcgagcaacggtttatgcagagtgaatggcaccagacccgcgcgggtcggcagcacgttgaggccaaattgttcggcaatcttataaccaaacgggctcgcgcccagccccggcatactcagcccaccagtcgcgatgaccagcttttcgcaaccgacagtcatgccgttcagatcaagcgtgaagcctgtttcatccttcgccacactcagcacttcgctacgcaatctgaaggtcacattgcccttctcgcactcatccaccagcatgtcgacaatctgctgcgcggagtcatcgcagaagagttgccctaacgttttctcgtgccaggcgatgccgtgtttattgaccagatcaatgaaatcccactgggtaaaacgtgcgagtgcagacttacaaaaatgcggattctggctcagataagcgcctggttcgacataaaggttggtaaagttgcagcgcccaccgccagacataaggattttgcgccctggttttttaccattatcgatcagcagaacccggcgtcctgcctgacctgccagcgcagaacagaacatacccgccgcaccagcgcctataataatggcatcaaacctttccacgttgcgctcctcttagaaaaaacgggcgtgaattgtaaagattcctcagtggtcgcaccagcatcaatattactaaaaggaagtatttgcctgaattatataagataattattttttgagtgaaatccatacagggggcaaatcaaaaaaagtctatatttcactttgcccgcgccgcgaaagtcactgataatgcgccgcgttcatgtcctcaaaatggcgtaacgtcctatgctacatttgtttgctggcctggatttgcataccgggctgttattattgcttgcactggcttttgtgctgttctacgaagccatcaatggtttccatgacacagccaacgccgtggcaaccgttatctatacccgcgcgatgcgttctcagctcgccgtggttatggcggcggtattcaactttttgggtgttttgctgggtggtctgagtgttgcctatgccattgtgcatatgctgccgacggatctgctgcttaatatgggaagctctcatggccttgccatggtgttctctatgttgctggcggcgattatctggaacctgggtacctggtactttggtttacctgcatccagctctcatacgctgattggcgcgatcatcgggattggtttaaccaatgcgttgatgaccgggacgagtgtggtggatgcactcaatatcccgaaagtattaagtattttcggttctctgatcgtttcccctattgtcggcctggtgtttgctggcggtctgattttcttgctgcgtcgctactggagcggcaccaagaaacgcgcccgtatccacctgaccccagcggagcgtgaaaagaaagacggcaagaaaaagccgccgttctggacgcgtattgcgctgatcctttccgctatcggcgtggcgtttagccacggcgcgaacgatggtcagaaaggcattggtctggttatgttggtattgattggcgtcgcgccagcaggcttcgtggtgaacatgaatgccactggctacgaaatcacccgtacccgtgatgccatcaacaacgtcgaagcttactttgagcagcatcctgcgctgctcaaacaggctaccggtgctgatcagttagtaccggctccggaagctggcgcaacgcaacctgcggagttccactgccatccgagcaataccattaacgcgctcaaccgcctgaaaggtatgttgaccaccgatgtggaaagctacgacaagctgagccttgatcaacgtagccagatgcgccgcattatgctgtgcgtttctgacactatcgacaaagtggtgaagatgcctggcgtgagtgctgacgatcagcgcctgttgaagaaactgaagtccgacatgcttagcaccatcgagtatgcaccggtgtggatcatcatggcggtcgcgctggcgttaggtatcggtacgatgattggctggcgccgtgtggcaacgactatcggtgagaaaatcggtaagaaaggcatgacctacgctcaggggatgtctgcccagatgacggcggcagtgtctatcggcctggcgagttataccgggatgccggtttccactactcacgtactctcctcttctgtcgcggggacgatggtggtagatggtggcggcttacagcgtaaaaccgtgaccagcattctgatggcctgggtgtttacccttccggctgcggtactgctttccggcgggctgtactggctctccttgcagttcctgtaatcgtacgcaccaaaacgagcgggtcagctggcccgcttcagattgtgacatagtgcgctttgttcatgccggatgcggcgtgaacgccttatccggcctacaaaaacatgcaaattcaatagattgcagagattatgtaggcctgataagcgtagcgcatcaggcaattttgcgtttgtaatcagtctcgagcgggtcagtttactggcccgctttttttatgcgttattattgctgaagtgcttaatgccaaatcatcaatgcaatcaggctgaccaccaccagaccacacaatgcgctggtcagaataaactgccgacgcacccgctcacagcggcgaataaattcatcatcgtgatgatcgcgataacgttgggcatagatataccaaacgagacgcacctgtttgttgggttggccatgattggtaaaaaagccccctccatcaacatattgatagagcaatggatcgcagttacgcagtaccactaacaacgcgcgtagactactgaaatagcgcgccatgttaacaatgcaaacgacacataaagcccaaaataatgcgacggtgcttatcatacctcctccccggcgacctgcccgcggagttccaccccggggctaccgctcccgatacgctgccaatcagttaacaccaggtcctggagaaaccgcttttgtggtgaccaacatacgagcggctctatagatagtgtaggagatcaggttgttttttttccagaaggttaaccactatcaatatattcatgtcgaaaatttgtttatctaacgagtaagcaaggcggattgacggatcatccgggtcgctataaggtaaggatggtcttaacactgaatctttacggctgggttagccccgcgcacgtagttcgcaggacgcgggtgacgtaacggcacaagaaacgctagctggccagtcatcgacaactttatggaaggagtaacactatggcttataaacacattctcatcgcggtcgacctctccccggaaagcaaagttctggtagagaaagcagtctctatggctcgcccctacaatgcgaaagtttctctgatccacgtagatgtaaactactctgacctatacaccgggcttattgatgtgaatctgggtgatatgcagaaacgcatctctgaagagacacatcatgcactgaccgagctttccactaatgcaggctacccaatcactgaaaccctgagcggcagcggcgacctgggccaggttctggtcgatgcaatcaagaaatacgatatggatttggtggtttgtggtcaccaccaggacttctggagcaaactgatgtcttccgcacgtcagctgatcaacaccgttcacgttgatatgctgattgttccgctgcgcgacgaagaagaataatcttccctctacgacgtgttcctgaacgcccgcatatgcgggcgttttgctttttggcgcgccttgttacctgatcagcgtaaacaccttatctggcctacggtctgcgtacgcaatcaaaatccccagccaatacaacatttaacaccatcatattttccatcattagtgtgatcatctggttattttctgttgtaatagtgtattaatctattcaccgcatcaatattaagaatctctgacagatgtaaactttttcgcgcgttatcccttacgcgttcatacttttcaggatggtattggaaggttaataaatatgaatacaacaacacccatggggatgctgcagcaacctcgcccatttttcatgatcttttttgtcgagttatgggagcgattcggctactacggcgtgcagggcgtactggcggttttcttcgttaaacagcttggattcagccaagagcaggcttttgtcacttttggtgcttttgctgcgctggtctatggcctcatttccattggcggctatgtcggcgaccacctgctggggaccaaacgcaccattgttcttggagcacttgtgctggcgattggctacttcatgaccggcatgagcctacttaagcctgacctgattttcatcgccctggggactatcgctgtcggtaacggcctgtttaaagctaacccagccagcttgcttagcaagtgctatccgccgaaagatccgcggcttgatggcgcattcaccctgttctatatgagcatcaacatcggcagcttgatagcgttaagcctggcccctgtgatcgctgatagattcggttatagtgtcacctacaacctgtgcggggcggggttaattatcgcattactggtttacatcgcctgtcgtggaatggtgaaagacattggttctgaacccgacttccggccaatgagcttcagcaaactgttgtacgtgttacttggcagcgtggtgatgatcttcgtatgcgcatggctgatgcacaacgtagaagtcgccaatctggtgctgattgttctctccatcgtcgtcaccatcatcttctttcgtcaggcattcaagctggataaaaccgggcgcaataaaatgtttgtcgcctttgtcctgatgctcgaagcggtggtgttttacattctctacgcccagatgccaacaagcctgaacttctttgccatcaacaacgtgcatcatgaaattctcggtttttccatcaacccggtcagcttccaggcgcttaacccgttctgggtggtactcgccagcccaatactggcaggcatttacacgcatctgggtaacaaaggcaaagacctcagcatgccgatgaaatttactctcggcatgtttatgtgcagtctgggctttttgacggcggcagctgcgggaatgtggtttgcggatgcacaagggctgacaagcccatggtttatcgtgctggtgtacttattccagagcttaggtgaactgtttattagcgcccttggcctggcgatgattgctgccctggtgccgcagcatttgatgggctttattctcgggatgtggttcctgacgcaggctgccgcgttcttgctgggcggctatgtggcaacatttaccgcggtgccggacaacattaccgatccgcttgagacgttgcccgtctataccaacgtgtttggtaagattggtctggtcacgctgggcgttgcagtagtgatgctgttgatggtgccgtggctgaaacgcatgattgcgacgccggaaagccattaattattcttgcagaaagcagggtagcgttatcgctaccctgttttagttttacactggcgtacctgcatagatatcaaagcgatgccctttagtgactaccgcgtttggcgtggcgacattcgccagcggtggcgcgtagtccgggcgctttaccaccacgcgtttggtcgccagcaagcgtgcaggctccagtaatccatcggcatcaagatccggtcccaccaggctctgaaagacacgcatctcttttttcactagcgcgcttttctgcttatgcgggaacatcgggtcgagataaaccacctgcgggcgcggggtaatatcagtcagcgccgtcaggctggaggcgtgaattaactgcaaccgctcctgcaaccagccgccgatttccgcatccgcataaccacgcgccaggccgtcgtcgagtagcgcggcaaccactggattacgctccagcatccgcacgcggcagccgacactagccagtacaaaggcatcgcgcccaagtcctgcagtggcatccaccacatccggcaaataatcgcctttaatgcccaccgctttcgccaccgcctcaccgcgaccaccgccgaatttgcgtcggtgcgccatcgctccgccaacaaaatcaacaaagatgccgccaagttttggctcatcacgcttgcgcaattccagatgttccggcgttaacaccagcgccatcaggttgtcttcatcgtgctccagcccccagcgggccgccagaacagataaggcaccgtctccggtgcctgtttcatcaattaagcagattttcactgaatgatcagcccttaatgccgtaatgctccagcatcgcatccagctgcggttcacgaccacggaagcgtttgaacagatccatcggctcttcactaccgccacggctcagaatgttgtcgaggaagctctgcccggtttcacggttgaaaatgccctcttcctcaaagcggctgaaagcatctgccgccagtacgtcagcccacaggtagctgtagtaacctgcggcataaccaccggcgaaaatatggctgaaagcgtgcgggaaacggccccaggacggagatggcaccacggcaaccagtttcttgatttctgccagagtttcgaggatttttgccccctgatccgggcggaactcggcatgaaggcggaaatcaaacaggccgaactccagctgacgcagaataaacagcgccgcctggtagttcttcgccgccagcattttatccagcaactctttcggcagcggttcgccggtttcatagtgaccagagataaacgccagcgcctccggctcccagcaccagttttccataaactgactcggcagttcgaccgcatcccacggcacaccgctgataccggaaacaccagcggtttcgatgcgggtcagcatatggtgcaggccgtgaccgaactcgtggaagagggtgatcacttcgtcgtgagtgaacagcgccggtttaccatttaccgggcggttgaagttacaagtcaaatacgcgaccggtttttgcaaagaaccatcagctttacgcatctggcctacgcagtcatccatccacgccccgccgcgcttgttttcacgggcatacagatcgaggtagaagctaccgcgcagttcgttattttcgtcatacagttcgaagaaacgtacatccggatgccagacatcaacatctttacgctctttagcggtgatgccgtaaatacgcttaaccacttcaaacaggccgttaaccgctttgttttccgggaagtacggacgcagctgttcgtcactgatgctgtagaggtgctgtttttgtttttcgctgtagtaagcgatatcccacggctgcaactcatcgacgccaaattcggctttggcaaaggcacgcaattgcgccagctctttttcgccttgtggacgcgcgcgttttgccagatcggttaagaaatccagcacctgctgcgggttttctgccattttagtggcaagggatttaaaggcgtagttttcaaagcccagcagttgcgccagttcgtgacgcagcgcgaggatctcttccatcaccttgctgttatcccatttaccggcgtttgggccttgatcggaggcgcgggtgctgtaagcgcgatacatctcttcacgcagagcctggttgtcgcagtaggtcattaccggcaagtagcttgggatatccagcgtcagcaaataaccttccagctctttcgcttcggcctgggcttttgccgcagccagcgcgctttctggcatccccgccagctccgcttcgtcggtaacgagtttggtccagcccattgtcgcatcgaggacgttgttgctgtactggttgcccagttcagaaagacgggtcgcaatttcgccgtaacgctgctgtttctctttcggcagacctatgccagagagttcaaagtcgcgcagtgcgttatcaaccgctttcttctgcgccgtgttcagcgtggcgtaatgatcgccatcgcgcaggtcgcgatacgctttatacagcccttcatgttgccctacccaggtgctgtattcgctcagcagcggcagggtttgttcgtaggcttcacgcagttccgggctatttttcacgctgttcaggtggctgaccggggagaagatacgccccaacacatcgtccacttccgccagcggctggcagagattttcccaggtgtacggtgccccttgcgctactacgcgctccacgttttcgcggcagtcgttcaatgccttagtcacggctggaacgacatgttccgggagaattttagaaaacggaggcaattcaaagggagtcagtaacggattcgtcattcgcgcagtcctggttaaagaggttaaggaagcgctcaacaggcgctttacataatgtgtgtagcatggggttaagtgtagtgaatttcaatgagaaacgttacgctttcgcggcggcggcctcttttcggtatactgtcctgatacgcttttgtgcgccccgaatacgggccgatttttacttaccggaacacctttacccatgctcagttatcgccacagctttcacgctggcaaccacgccgacgtccttaaacataccgttcagagcctgatcatcgagagcctgaaagagaaagataaaccgtttctctatctcgacacccacgcaggggccgggcgttatcagttaggcagcgaacatgccgagcgtaccggcgaatatctcgaaggcatcgcccgtatctggcagcaggacgatttgcccgcagaactggaggcgtacatcaatgtggtaaaacacttcaaccgtagcggtcagttgcgttactaccccggtagcccgttgattgctcgcctgctactgcgtgaacaggacagcctgcaactgaccgaactgcacccgagcgattacccgttgttgcgttctgaatttcagaaagatagccgtgcgcgtgtcgaaaaagccgacggtttccagcagcttaaggccaaactgccgccggtttcccgccgtggtttaatccttatcgacccgccgtatgaaatgaaaactgactatcaagcggtggtcagcgggatagcagaaggttacaaacgtttcgccactggtatttacgcactgtggtatccggtggtgctgcgtcagcaaattaagcgcatgatccacgatctggaagcgaccggtattcgcaaaattctgcaaattgaactggcggtactgccagacagcgatcgccgtggcatgaccgcttccggcatgattgtgattaacccgccgtggaaactggaacaacagatgaataacgtgctgccgtggctgcacagcaaactggttccggcaggcaccgggcacgccaccgtaagctggatcgtgccggagtaattgcagccattgctggcacctattacgtctcgcgctacaatcgcggtaatcaacgataaggacactttgtcatgactaaacactatgattacatcgccatcggcggcggcagcggcggtatcgcctccatcaaccgcgcggctatgtacggccagaaatgtgcgctgattgaagccaaagagctgggcggcacctgcgtaaatgttggctgtgtgccgaaaaaagtgatgtggcacgcggcgcaaatccgtgaagcgatccatatgtacggcccggattatggttttgataccactatcaataaattcaactgggaaacgttgatcgccagccgtaccgcctatatcgaccgtattcatacttcctatgaaaacgtgctcggtaaaaataacgttgatgtaatcaaaggctttgcccgcttcgttgatgccaaaacgctggaggtaaacggcgaaaccatcacggccgatcatattctgatcgccacaggcggtcgtccgagccacccggatattccgggcgtggaatacggtattgattctgatggcttcttcgcccttcctgctttgccagagcgcgtggcggttgttggcgcgggttacatcgccgttgagctggcgggcgtgattaacggcctcggcgcgaaaacgcatctgtttgtgcgtaaacatgcgccgctgcgcagcttcgacccgatgatttccgaaacgctggtcgaagtgatgaacgccgaaggcccgcagctgcacaccaacgccatcccgaaagcggtagtgaaaaataccgatggtagcctgacgctggagctggaagatggtcgcagtgaaacggtggattgcctgatttgggcgattggtcgcgagcctgccaatgacaacatcaacctggaagccgctggcgttaaaactaacgaaaaaggctatatcgtcgtcgataaatatcaaaacaccaatattgaaggtatttacgcggtgggcgataacacgggtgcagtggagctgacaccggtggcagttgcagcgggtcgccgtctctctgaacgcctgtttaataacaagccggatgagcatctggattacagcaacattccgaccgtggtcttcagccatccgccgattggtactgttggtttaacggaaccgcaggcgcgcgagcagtatggcgacgatcaggtgaaagtgtataaatcctctttcaccgcgatgtataccgccgtcaccactcaccgccagccgtgccgcatgaagctggtgtgcgttggaagcgaagagaagattgtcggtattcacggcattggctttggtatggacgaaatgttgcagggcttcgcggtggcgctgaagatgggggcaaccaaaaaagacttcgacaataccgtcgccattcacccaacggcggcagaagagttcgtgacaatgcgttaaatgttaaagggctaagagtagtgtgctcttagcccttaattacgtttccgctatcagttcagaagctgaagcagaaagcggatcagttccagcagcgcaattaacgcccctagaacgatgattgctttatcaatcacccgttttctccatgcgatggagtgagaatgcatccgcttactcatccactgcctgtcacggcgcatgtctcattgttagataagaactctctcactccggccagagcatcagttaacggcaccacccgtacttctgaccaggactttgaaagcgtttatgcgcattgccagagtgaaaatgcctcagagctaactggataatcatacagtacatgcaggttataaaaccagcacgtccttgcaatagtttcagtatggtattagcattgatgcgttagatgatggctatctcactccagtcagagccaccaactcagggctggaaagtaaaaaaccgacgcaaagtcggtttttttacatccggattcggacaaggcttaatatgacgatgacccagtgaaagtatataaatcgtcactgcgatatataccgaagtgctccctccgccagctgaagaaatcgctaattcttgcaatgttagccactggctaatagtattgagctgttagataagaactctctcactccagccagagccaccaactcagggctggaaagtaaaaaaccgacgcaaagtcggtttttttacgtcctgattcagacctcctttcaaatgaatagccaactcaaaattcacacctattaccttcctctgcacttacacattcgttaagtcatatatgtttttgacttatccgcttcgaagagagacactacctgcaacaatcaggagcgcaatatgagttttctgttacccatccaattgttcaaaattcttgctgatgaaacccgtctgggcatcgttttactgctcagcgaactgggagagttatgcgtctgcgatctctgcactgctctcgaccagagccagcccaagatctcccgccacctggcattgctgcgtgaaagcgggctattgctggaccgcaagcaaggtaagtgggttcattaccgcttaagtccgcatattccagcatgggcggcgaaaattattgatgaggcctggcgatgtgaacaggaaaaggttcaggcgattgtccgcaacctggctcgacaaaactgttccggggacagtaagaacatttgcagttaaaaatttagctaaacacatatgaattttcagatgtgttttatccgggaggcattatgttactggcaggcgctatctttgtcctgaccatcgtattggttatctggcagccgaaaggtttaggcatcggctggagtgcaacgctcggcgcagtactggcgttagttacgggcgtggtccatccgggtgatattccggtggtgtggaatatcgtctggaacgcgacggctgcgtttatcgccgtcattatcatcagcctgctgctggatgagtccggcttttttgaatgggcggcgctgcacgtcagtcgctggggtaatggtcgtggtcgcttgctgtttacctggattgtcctgctcggtgctgccgttgccgccctgtttgccaatgatggcgcggcgcttattttgacaccgattgtcatcgccatgctgctggctttagggttcagtaaaggcactacgctggcgttcgtgatggcggccggattcattgccgataccgccagcctgccgcttattgtctccaacctggtgaatatcgtttccgctgatttctttggcctcggctttcgcgaatacgccagcgtgatggtgccggtggatatcgccgcgattgttgccacgctggtgatgttacatctctattttcgcaaagatattccgcagaactacgatatggcgctgctgaaatctcccgcagaagcgatcaaagatcctgctacgttcaaaactggctgggttgttttactgcttctgctggtgggatttttcgtcctggaaccgctcggcattccggtgagcgccattgcagctgtgggcgcgctgatattatttgtcgtcgctaaacgcggtcatgcgattaatacgggtaaagtcctgcgcggtgccccctggcagattgtcatcttcagcctcggcatgtatctggtggtttatggcctgcgcaatgccggattaacggaatatctttctggcgtactcaacgtgctggcggataacggcctgtgggccgcgacgctcggcaccggattcctcaccgccttcctctcttctattatgaacaatatgccgacggtactggttggcgcgttgtccattgatggcagcacggcatctggcgttatcaaagaagcgatggtttatgccaatgtgattggctgcgatttgggaccgaaaattaccccaattggtagcctggctacgctactctggctgcacgtacttagccagaagaatatgactatcagctggggatattacttccgtacagggattatcatgaccctgcctgtgctgtttgtgacgctggctgcgctggcgctacgtctctctttcactttgtaatgagatactgatatgagcaacattaccatttatcacaacccggcctgcggcacgagccgtaatacgctggagatgatccgcaacagcggcacagaaccgactattatccattatctggaaactccgccaacgcgcgatgaactggtcaaactcattgccgatatggggatttccgtacgcgcgctgctgcgtaaaaacgtcgaaccgtatgaggagctgggccttgcggaagataaatttactgacgatcggttaatcgactttatgcttcagcacccgattctgattaatcgcccgattgtggtgacgccgctgggaactcgcctgtgccgccctagtgaagtggtgctggaaattctgccagatgcgcaaaaaggcgcattctccaaggaagatggcgagaaagtggttgatgaagcgggtaagcgcctgaaataaagcggcgatatcccccccacaggttgttagaaaagtgcgctttatttatgtcggatgcgacgctggcgcgtcttatccgacctacaaagttatgaaaattcgatgaatagtatgttatttgtaggcctgacaggcgtagcgcatcaggcgattttgctatttacacagtactccctgcgtgagattccaattatcgcgtccagcatggtgtatcagtgagctgcttagttatcagcgatacagcgcagtagtttaaagacgtactggattatgatttatcagtggtttacacaacaaattattaaataattataagataccttaacccattttattattacacatctaaaacatcacaaaaaaaatcacttcacacactatcagagaacataataactttttaaaatgagcgcattttgatagttgttaacgatttcctttacgatactatcactaccctttttttacacacaaatattaccgggtggagataaaagggaaatcaaaggtaattatatcaggaagatataacgcattacatttattgtgtgtagaagaaaatccattcctgttctaattatccaatttaaacatcttagcataaaacaaatgatgaataaggaattttatattgattattagcactttataatcattgaataaaaatagattttatgtacttttaaaacaatgcactatattatggggtgatggatattcatgtcacgccccaaaattaactgagttcacctaaacagaaaggatataaacatcagacaggtttacgttactatcaggcatatcacctcagaatcagatgaaaactataaagaaatatctattatggttttaatatttgttgataaggatagtaacatgaacatgacaaaaggtgcactcatcctcagccttagttttttgcttgccgcatgtagtagtattccgcaaaatatcaaaggcaataaccaacctgatattcaaaaaagttttgttgctgttcataaccagccggggttatatgttggtcaacaagcgcgctttggtgggaaggttatcaacgttatcaatggcaaaacggatacgttgttagaaatctctgtattaccgttggatagctatgcgaagcctgatattgaagccaactatcagggccgactgctcgccagacaaagcggcttccttgatccagtgaactatcgtaatcactttgttaccatcctcggcaccattcagggtgaacaacctggctttatcaataaagtcccgtataacttcctggaagtgaatatgcagggcatccaggtgtggcatttgagagaagtggttaataccacctataacctgtgggattacggctatggtgcattctggccggaaccgggctggggtgcgccttactacaccaatgcggtgagtcaggtaacacctgagctggtcaaataacaccaccgaaagatgcagatgctttctcagcatctgcatcatgcattacatcaaattaatacacagtaagctaactattattattataagccctgtcctgttaattacctttggcaaactgattataaagttaatgtccgcaccaggagtcggttatgtttcttataattaccagggatacgatgttcttcaccgcgatgaaaaacattctgagtaaaggtaatgtcgttcatatacagaacgaagaagagatcgacgtaatgttgcatcagaatgccttcgtcattattgatacattaatgaataatgtatttcattctaattttctcactcaaattgaacgattaaaacctgtccatgtcattattttctccccctttaatattaaacgctgcctggggaaagtgccggtgacctttgttccgcggactatcactatcattgattttgtcgcactcatcaatggcagttactgctctgtgcctgaagcggctgtgagtcttagccgcaagcaacatcaggttctgagctgcattgcgaatcaaatgacaacggaagatattctggagaaactgaaaataagcctaaaaacgttctactgccataaacacaatatcatgatgatcctcaatcttaagcggatcaatgagctggtacgccatcagcatattgattatctggtgtgaatttcaggcttacggtgagtctggctacgctgccacacagattagctaatactaacgcctttcacccctgccataccttttaataatcgcaacaggtcttctatgctcgttgtggcatgaagctggatatcaatggcgaccacttcatgatcttcattttcctgcaagctaactaaatcagtttttattttttgctgcttaaaccagtcgagcatacttaccgtattaccgttcactaatgtcagctgtaaatggtaatttttgttcatcaggcggaaggttaattgatggaagacttccagcaccaacaaggtcatcacactaccataaatacccagttcgtacataccgctgccaataaccatacctatggcggcggtcacccagatatccgctgccgtcgtcagacctacaatattttggttacgaacgagaatgttacctgcaccgataaacccgacgcccgtcaccacctgagcagcaatacggctggggtcgagtccgacgtgatctaaagacagcacgtcagcaaaaccatatttgctaacaatcataaacagggcgcttcccatgccaattaatacatgtgtgcgtaaccctgctcctttgccgcgcatttgcctttccatgccaatagcgccacaggcaattgccgcgagtataagacgtataataaattctgctgtcatataaaaatgcaaaaaggagcagcaagatggctcaacttgctactcctttttacttgcacctcattaattcggcaagtcattagatgcttgatttttgaaggtatacaaatttttctgcgggtttttcttacagtattcgatcactttaggaatttgagtgagatcggtttcatttaaagtaacggtatcgccacctttatatactgtttcttcatgcagcatccaccatgcaaccggggtcattgcttttggattcagatcaataaattcctggcaggtcatatctttagcggattcattggctgccaacgcagattgtgcgttcaccagactcaaagccgctacagcgcccataaaaataaacgctttacggagagaactaatattcattttgtaacccattcaatatagagattatatatgaacaggaggaatagctgcttttaaagaagatattccggcctgttcaatatgcaaggaagtacgatgtaacgcattcccggaattacatatctttcttaattttgtcccattcgcctttaactttatctttaaagttggcttgtttatcctgagtacaagcctgaacgatagctggggttacggttgcaataccctgaacatctaaaaccgcatcttctggtttatctttgttgttcagcgcttcagcaaaaccaactgcagttggctggaaggattcgtccacagccaggaaatcttcacaggtccaggagttgaccggttttttgttatcagctgctttttgcgcatccgctgcattgctcacaactggcagaagaagcagaccaccaagaataacgcctaatacttttttcatcgtaatatcctcaactataaagtgaaagagccgtcacgaatcaatttcgacactgaggttataacctggttttctgtatatgtcatgttgatggaaaatatcaaaatcagatatttttatttcaatacaatgagttacagatgcatcagatactgcaattaggaaatttttattaaatcgactgcattcttagacgcgtttttggcatagattgatagcaggggattttcttcttaattttatagggtggttctatgttatatatagataaggcaacaattttgaagtttgatctggagatgcttaaaaaacatcgcagagcaatccagtttattgccgtgctgctgtttatcgtcgggttgctgtgtatcagtttcccgttcgtctctggcgatattttaagcacagtagtgggtgcattattaatctgcagcggtattgcgcttattgtcgggttattcagcaaccgcagtcataatttctggccggtattatccggtttcctcgtcgcagtcgcctatttattgatcggctatttcttcatccgcgcaccggagctgggcatttttgccattgcggcatttattgccggtttgttctgtgttgcaggggttattcgcctgatgagttggtatcgtcagcgtagtatgaaaggcagctggctacagctcgttattggtgtgctggatatcgtcattgcctggatattccttggtgcaacgccgatggtgtctgtaacgctggtttccacactggtgggaattgaactgatatttagcgccgccagcctgttcagcttcgccagtttgttcgttaagcagcaataattaccccggttgtcacccggatcatagtcacttgatgtgactatgatccgattaatactctctccgctacgcagtgttgtagatcaattgcgcactatcattgaaataattacctgctagtgattatttcaacctactgaatttcatctaatttttttcactctatggcaaattagccatttcaaacattatcatggctgatattttccgtagtcaggtttaatgttttaaaagtgctgtgggaaagtgaacaaagagttccgtaagcgttgatgctatgggcggttaaataagtaatccgggttcatttttttgcaactggcgttgattacattgcataaatatccgtgtctccagacgctatataaaaacctgaagacatgaatgcgttatttactcaggtaatttcaatgcgttaaaagaaagctggcaatccaattgccagcttaagtcgaaacaaggagactcgatatttaaatcggattacattttaactttagtaatattcttcagagatcacaaactggttattgataacttattcttgggcagtaatccgcaaacgttaactttttgtttgctatttacaagctgataacaaccaggaatcttacttaggatcaatatatggagtgcgtgatggataaatctgaagtattgattagtgttaatagacgtattagttcacgaagggtaaagttcttataggcgtttactatattgaacaacgattcggacaaggatgtaaataatgaaaaggatgacatattcgaaacgataacggctaaggagcaagttatgatttttctcatgacgaaagattcttttcttttacagggcttttggcagttgaaagataatcacgaaatgataaaaatcaattccctgagtgagatcaaaaaagtaggcaataaacccttcaaggttatcattgatacctatcacaatcatatccttgatgaagaagcgattaaatttctggagaaattagatgccgagagaattattgttttggcaccttatcacatcagtaaactaaaagctaaagcgcctatttattttgttagccgcaaagaaagtatcaaaaatcttcttgagattacttatggtaaacacttgccccataagaatagtcaattatgttttagtcataatcagttcaaaattatgcaactgattctgaaaaataaaaatgaaagcaatatcacgagcacgctcaatattagccaacaaacattaaagattcagaaattcaacattatgtacaagctgaaactaagacgtatgagcgacatcgtcaccctgggtatcacatcttatttttaatcaggacataagcaactgaaattgatggctggcatgacgagggatgcagatgctgatttcattacccccggtgattactaaaggagaggctaaaacgactttattcccctggtatgtgtatccaccagtagaacccttcgttgcccgaatgctggcaggaactgttggcagaacggcaacattttttttgtcgttgacctcaccatgtcgatcactgtgcctgtatcccaccttactggctgacaaccccactatgccgctggtctgtaaatccctcatatctctcctcgcgcgcaatttaaagaaccgttatttctcaagaattttcagggactaaaatgaacagaagaagaaagctgttaataccgttgttattctgcggcgcgatgctcaccgcctgcgatgacaaaagcgcggaaaacgccgccgccatgacgcctgaggtcggtgtcgtcacactctcccccggtagcgtcaatgtgttgagcgaattgcccggtagaaccgttccttatgaagttgccgagatacgtccccaggtgggcggtattatcattaaacgcaactttatcgaaggcgataaagtgaaccagggcgatagcctgtatcagattgatcctgcacctttacaggccgagctaaactccgccaaaggcagcctggcgaaagcgctctctaccgccagcaatgcccgcatcacctttaaccgccaggcaagcttgctgaagaccaactacgttagccgtcaggattacgacaccgcgcgcacccagttgaatgaagcagaagccaatgtcaccgtcgccaaagcggctgttgaacaggcgacgatcaatctgcaatacgcgaatgtcaccagcccgattacgggcgtcagcgggaaaagcagcgtgaccgtcggcgcactcgttaccgctaatcaggcagatagcctggttaccgtacaacgtctggacccgatttatgtcgatctcacgcagagcgtgcaagatttcttacgcatgaaagaagaggtcgccagtgggcaaatcaaacaggttcagggcagtacgccagtacagctcaatctggaaaatggtaaacgctacagccagaccggcacgctgaaattctccgacccgacagtggatgaaaccacgggctccgtgacgttacgggcgattttccccaacccaaatggtgacttgctgcctggcatgtacgtcacggcattagtggatgaaggtagccgccagaatgtattactggtgccgcaggaaggcgtcacccacaacgcccagggtaaagcaacggcgctcattctggataaagacgatgtcgtgcagctacgcgaaattgaagccagcaaagccatcggcgaccagtgggtcgtcacctctggcttgcaggctggcgatcgggtgatcgtttccggtttgcaacgcattcgtccgggtatcaaagcacgagcaatttcctccagccaggaaaacgccagcaccgaaagcaaacaataacgttgcaggcttaaggggactttcatggctaactattttattgatcgcccggtttttgcctgggtacttgccattattatgatgcttgcaggtggtctggcgatcatgaacttaccggttgcgcagtatccgcagattgcgccaccgaccattaccgtcagcgctacctatccaggtgccgatgcgcaaacggtagaagacagcgtcactcaggtgattgagcaaaatatgaatgggcttgatggcctgatgtacatgtctagtaccagtgatgcggcgggcaatgcctctatcactctgaccttcgagactgggacatctcctgatatcgcacaggttcaagtgcaaaataaactgcaactcgctatgcctagtttacctgaagcagtgcagcagcaggggattagcgtcgataagagcagcagtaatatcctgatggtagcggcgtttatttctgataacggcagcctcaaccagtacgatatcgcggactatgtagcgtctaatatcaaagacccgctaagccgtaccgcgggcgttggtagcgtacaactctttggttccgagtatgccatgcgtatctggctggacccgcaaaaactcaataaatataacctggtaccttccgatgttatttcccagattaaggtgcaaaacaaccagatttccggtggtcaactgggtggcatgccacaggcggcagaccagcagctaaacgccagcatcattgtgcagacgcgtctgcaaacgccggaagaatttggcaaaatcctgttgaaagttcagcaagatggtagccaagtgctgctgcgtgatgtcgctcgcgtcgaacttggggcggaagattattccaccgtggcacgctataacggcaaacctgctgccgggatcgccatcaaactggctgccggagcaaacgccctggataccagccgggcagtcaaagaggaactgaaccgcttaagtgcctatttcccggcaagtctgaagacggtttatccttacgacaccacgccgtttatcgaaatttctattcaggaagttttcaaaacactggttgaggctatcatcctagtcttcctggtcatgtatctgtttttgcagaatttccgtgccacaatcatcccgacgattgccgtaccggtggttattctcgggacgtttgcgatcttgagcgcggtcggtttcaccatcaacacgttgactatgttcgggatggtgctggcgatagggttactggtggatgacgccatcgtggtggtggagaacgtcgagcgtgtcattgcggaagataagctaccgccgaaggaagcgacgcataaaagcatggggcagatccaacgtgcgctggtcggtattgccgttgttctttccgcagtgtttatgccgatggcctttatgagcggtgcaaccggggagatctaccgccagttctccatcacgctgatctcctccatgctgcttagtgtatttgtggcaatgagcctgacccctgccctgtgcgccaccattctgaaagccgcgccggaaggcggtcacaaacctaacgccctgttcgcacgcttcaacacgctgtttgaaaaaagtactcaacactataccgatagcacccgcagcctgttgcgttgtaccggtcgctacatggtggtctacctgctgatttgcgccgggatggcggtgctgttcctgcgcacgccgacctctttcttaccagaagaggatcagggggtatttatgaccaccgcgcagttaccttccggtgccaccatggttaacaccacgaaagtgctgcaacaggtgacggattattatctgactaaagagaaagataatgtccagagcgtgtttaccgttggcggctttggcttcagcggtcaggggcaaaacaacggcctggcgtttatcagtctcaagccgtggtctgaacgtgtcggtgaggaaaacagcgttaccgcgatcattcagcgggcaatgattgcgttaagcagtatcaataaagccgtcgtcttcccgttcaacttacccgcggtggctgaactgggtaccgcgagtggttttgatatggaactgctggacaacggtaacctggggcacgaaaaactaacccaggcgcgaaacgagctgttaagtctggcagcgcaaagtccgaatcaggtcaccggggtacgcccgaacggcctggaagatacgccgatgttcaaagtgaacgtcaacgctgcgaaagctgaagcgatgggcgtggcgctgtctgatatcaaccagacaatttccaccgccttcggcagcagctacgtgaacgacttcctcaaccaggggcgggtgaaaaaagtgtatgtccaggcaggcacgccgttccgtatgttgccggataacatcaaccaatggtatgtacgcaacgcctctggcacgatggcaccgctttctgcctacagctctaccgaatggacctatggtagtccgcgactggaacgctacaacggcatcccgagtatggagattttaggtgaagcggcggccgggaaaagtaccggtgacgccatgaaatttatggcagacctggtcgctaaacttccggcaggcgtcggctacagttggaccggactaagctatcaggaagcgttatccagtaatcaggctcctgcgctgtatgcgattagtctggtcgtggtgttcctcgccctcgccgcactctatgagagctggagtattccgttcagcgtgatgttggttgttccgttaggcgtcgttggcgcattactggccaccgatctgcgcggcttaagtaatgacgtctacttccaggttggtttgctgaccaccatcgggctttccgccaaaaacgccatcctgattgtcgaatttgccgttgagatgatgcagaaagaagggaaaacgccgatagaggcaatcatcgaagcggcgcggatgcgtttacgcccaatcctgatgacctctctggcctttattctcggcgtgctgccgctggttatcagtcatggtgccggttctggcgcgcaaaacgcggtaggtaccggcgtgatgggcgggatgtttgccgcaacagtgctggcaatttacttcgttccggtctttttcgttgtagtggaacatctctttgcccgctttaaaaaagcgtaacgtgtaaatgagagtaaggttgaacatgaaggttcagccttactctttcctgctaaccattcaccactcaacaaccagctaaccgtcaggaataccaggcttagtacacagcactgaaagtagaaaccactccagccattcgtcatcaatttgaacaacacaatactgacccacattcccgtaatcgtatgaattgtcagcttaataatcccaaacatgccgagtcttttcctcctgaaaataccgataccgcctggcaaactgcgaaagagaactagccggtagcccggcagaaatcatcagggaagagtttcacatgaagcaggtgtgagatcctgaccaatattcaaatgcgaaatatgtcaggaaaaggtacctgggctatgttgcgcaaactgatgtggcgttacaccataatattgtcgaaatgtgtttataaagtagcttgtactgctatagccacatttttccgcaatagtatgcagaggaatttgacgtaactcgagtaatcgtctggccatgctcatcctggaggcgagtaatattttactgaaacaggtattttcatcctgcaacttttttttgattagactctcgctggtatacattctttccgcgatatcgcgcagataccaacgtttggcgatatcaaagctaataaggcgttcaacttttccactaacagtgctgatgctattgaaaagtaaggggatcagttctttcttatgagaaaacatgcttaaacaggaaaggtagagcatattgctcagtatcggactatttaccccggattcattgaagctatcaaaaatcgccgtcaccagcggcatggggggactctggttaattaacaaacggtctttgctgtgtaaccctaaattgcgtggtagctgacgaatattttgtaagtaatggcaaactgtcagctcatcgatatccagtcgtcgcgtatccggactacaaaacgcaaaatcgtctgccaaatttttctccagcagcagaatactctcgttatgcaggcttattttttgctgttcatgataaatatcgaaactacgacgaatgaggatcacgctgcagacatgagtcatgattatcccttatatttcatactgcgattatttcaatttcagtatactaatgaaatgatgccagactgtttcttagcgcaaaaactgccagatttggtaggaccaaaatttatccacaaagtagttttgcataacagttaattgataataagtaaatgcagcacgaatatattttcgcacagcgtatagcttatgtttataaaaaaatggctgatcttatttccagtaaaagttatatttaacttactgagagcacaaagtttcccgtgccaacagggagtgttataacggtttattagtctggagacggcagactatcctcttcccggtcccctatgccgggttttttttatgtctgagtaaaactttataatcttattccttccgcagaacggtcagtgccgtaaaaattcccttgcgcaacaatacttgccgcgctgtcacggttgctcaatctctgcgcgcttcgctcctgatactctgtgggcgtcatcccataataatttcgaaagacgtaaatgaaatagctcacgctgtgatatccacaggatactgcaactcgcttaatactaaaaccatgtataacaataagttgcaaagcacgttgcattctacactcagtaagcaactgactataacttgtctcttcttcgcgcaattttttctttaacagacttggactcatcaacagctcgctggcgattcgggctagtgtccactcatgggcgatattattattgataaccgtacaaactcgtgttcgcatgttcggttgtaaaacgttcagaagcagcggtataaagtgctcatcctcaagaaaaacagataacaacgcaaagattaatgctcttttacgtagcatttctgcatagcgaagattcttattctggcttagttgcgcaacttcctgaaaaacaggaatatctctactacagtgatgaacgagtaaactagaaacttttttatgtgcatgaagatttaatgcctcctccttgagcatcgggagaaataaactaagcgtgtccctactcacgaatacaaaattttcaacacacttatctactcgaatttggcttgcatccgcaaaaaccaggtcaccgccattaaaatagcgatattcaccattaaccatggtgagaatatatttatgtcttgcatacgcaattagacaattcccatgtagactttgcatagttgacttaatattacataaacatattactgtttattaatgtagcacgccgccctcttaagtcaaattgattgataaataaatttaaacgaagcgggagaacaggatgataatgtgtgatgttctacgggcaggatgactggatttataatacaaaaacgtgtttaagaacacagggaaattaatagtaagcaaataatcccttttcgtgacattaaaggtaatcgctacatttaataaacattcatataacatatatcttatcaacacgatgaatagacagccaatatattattgcgattaataagcaaccgaatgcccagctgtttttttaaaggctgggcattcggtttttacaacgttatgttatcaggtgtgtttaaagctgttctgctgggcaataccctgcagtttcgggtgatcgctgagatatttcagggaggctttgtagtcttccagcaacagttcagcaaagtccatttcgaagccgcgacgacacataatgcgcatcaccacgatgtcggtggcttcaccgccgagagtgaaggccggaacctgccagccgcgcagacgcagacgttcagagaggtcgtacagggtgtatcccggatcttcaccatctttcagtttgaagcaaaccgccgggatgccttcgtccgggcgacccgtacagatgaactcatacggccccagtttggcgatttcatccgccagataagcggcaacctggtaagaggcgttctgtactttggtatagccttcacgaccgaggcgcaggaattcatagtactgtgcaattacctgacccgccgggcgggagaagttgatggcaaaagtaccaatttgaccacccaggtagtcaacgttgaacaccagttcctgcggcagcgcttcttcgtcacgccagataacccagccgcagcccagcggagccagaccgaatttatggccactagcactgatgcttttcacacgcggcaggcggaagtcccagacgatatccggggcgacgaacggtgccaggaagccaccgctggcagcgtcgatgtgcatgtcgatgtcgataccggtgtcggcctggaatttatccagcgcatcgtgcagcggttgtgggaactcatagttaccggtgtaggtcacgccgaaagtcggcaccacgccgatggtgttttcgtcacaggcttcaatcatgcgtttcgggtccataaacaactgaccggggcgcatagggatctcacgcagctccacatcccagtagcgggcgaatttatgccagcagatttgtaccggaccgcacaccaggtttggtttatccgttggtttgcctgcagcttccatacgcttgcgccaacgccatttcatcgccatcccgccgagcatacaggcctcggaagaaccaatggtgttggtgccaacggcctgaccatttttcggcgcaggcgcatgccacagatcggcaaccatatttacgcaacgcaggtcgatggctgcggattgcggatattcttctttgtcgatccagtttttattgatgctcaaatccatcaatttatggacgttttcgtcgtcccaggtctggcagaaagtggccaggttctgacgagcgttgccatcaagatataattcatcattgataatctgaaatgcgacatcatcgcgcatttcgtgcagcggaaatcgtttactctccgcgatagtagaaatggcctttgcgccaaaacgactatcgagtagttcactgcggaaatccgttaacagcttctggtccatttcgaactccttaaatttatttgaaggcaataaaaaagtaggatttatccgcaatggaagcaaggcattacaggcttaatttaaataacaaaatcctaagcagaaaaacgactttttataatataaacatttaacatgataatattaaaaacagactttattatcgtaataaaaatcgcccaaacattgctgttcgggcgatcaaattaattattgtttatcctgcatatacggcgtgtacaccccgttcagactgtgcaggaaagctacgatatcatccacatcctcctgcggcagctctttgcctacctgatagcgcagcatcagtttcaccgccccgtccagcgtcggcacgtcaccgcgatggaagtacggtgccgttaaagcaacgttacgtaaaccgggtactttctgacgcaatttatcacgctcttctttagtcacattcatacgaccaatatccgccgccgtaatttccccaaagttaaagtcttttttcagccccaacggttcaaaggaacgtccgccgagaataataccaccatgacaagttgcacatttattatctttaaataattgatagccttttttctgttgcgccgtcagcgcattttcatctccgcgcaaccatttatcaaatggggaatccggcgtaattaatgttttctcaaattcagcaatggcatcagtaatattttcgccactgaaaccttgcggatagacttcgaggaactgcgttttaagctgcggatctttttccagcttagcaataatttcgtcccaggatttgctcgccatttcaatcgggttcaacggcggtccaccagcctgatcctgcaatgttgccgcacgaccatcccagaactgctcaacgttaaatacactgttaaataccgtcggcgcgttaatcggcccaactgcgccaccaacaccaatgcttgtttttctgccatcgacgccccccgcattcaacgcatggcaatgagcgcaactaatggtgctatcagcgcttaaacggggatcgtgatacagcgcaaaacccaacgccactttttgcgcatcggtaggcagtttttgcgggatgggctgcaccggttcattgcgatgttccggagcagtatcattgctggcgtaatattccgcgcgctgttttgcaatccaggccagtatttccgcccgctcttcatcactcaccttacccgcccagtgtagcgcggtataacgcgttggtggcatagtttcatactgcatcacccattcaatcttattcaaatcgctttggctaacgggtttatcagccagcagtgccgcacgcacggcctcaaggttaaaagatttatatccaagcttaatgtcgtaatccatcaactgtttcgcgccaggaatataataataggcgggtaattctgcgctaggcgtgtggcaatagtcgcatcctttttcgcggagaaagcctaaaaccttattattttcactgacagcagatgcctgaacatcggcctgtttactgcgtttattatcgtggtaccacacataaccagataaccctaaatagcaaatcgcgacgccagccaggccgatcgcggtaatacgactgaccattttcattattcttccctcacggtggtgagttattgtgacccagaaaattttccagaatgctgcaaacgtctctgcgagacaaagccatcataaaaaacagggagatacgctttttgataggaatcaatcaattacatgaatataaactatcaataagatagcctgtgcctattacccagatcaggaatggcatatcatgattgcggcgagagcaggattgaatgttctgaaaatgaaaaacaacaccaaatcggtatttttataaattccattgatattagtgcgttatattttttgacaggttaataaacgtgatccaccgcacgctttgtcgcccaccaggcggagcgaatgactacccttaaagaaaagccgataattagcgacgaatttcggaggttggatccttatgctcaatcagaaaattcaaaaccctaatccagacgaactgatgatcgaagtcgatctctgctatgagctggacccgtatgaattaaaactggatgagatgatcgaggcagaaccggaacccgagatgattgaagggctgcctgcctctgatgcgctgacgcctgccgatcgctatctcgaactgttcgagcatgttcagagcgcgaaaattttccccgacagtaaaacctttcccgactgcgcacctaaaatggacccgctggatatcttaatccgctaccgtaaagtgcgccgtcatcgtgattttgacttgcgcaagtttgttgaaaaccacttctggctgccggaggtctactccagcgagtatgtaagcgacccgcaaaattccctgaaagagcatatcgaccagctgtggccggtgctaacccgcgaaccacaggatcacattccgtggtcttctctgctggcgctgccgcagagttatattgtcccgggcggccgttttagcgaaacctactattgggattcctatttcaccatgctggggctggcggaaagtggtcgggaagatttgctgaaatgcatggccgataacttcgcctggatgatcgaaaactacggtcacatccccaacggcaaccgcacctattatttgagccgcagccaaccaccggtttttgcgctgatggtggagttgtttgaagaagatggtgtacgcggtgcgcgccgctatctcgaccaccttaaaatggaatatgccttctggatggacggtgcagaaagcttaatccctaatcaggcctatcgccatgttgtgcggatgccggacggaagcctgctcaaccgttactgggacgatcgcgacacgccgcgtgacgaatcctggcttgaggacgttgaaaccgcgaaacattctggtcgcccgcccaacgaggtgtaccgcgatttacgcgcgggggcggcctccggttgggattactcttcccgttggctgcgtgatactggtcgtctggcgagcattcgtaccacccagttcatccccatcgatctgaatgccttcctgtttaaactggagagcgccatcgccaacatcagcgcgctgaaaggcgagaaagagacagaagcactgttccgccagaaagccagtgcccgtcgcgatgcggtaaaccgttacctctgggatgatgaaaacggcatctaccgcgattacgactggcgacgcgaacaactggcgctgttttccgctgccgccattgtgccactctatgtcggtatggcgaaccatgaacaggccgatcgtctggcaaacgccgtgcgcagtcggttactgacacctggcgggattctggcaagcgagtacgaaaccggtgaacagtgggataaacccaacggctgggcaccgttacaatggatggcgattcagggatttaaaatgtacggcgatgaccttctgggtgatgaaatcgcgcgaagctggctgaagacggtgaatcagttctatctggaacagcacaaactgatcgaaaaataccatattgccgatggtgttccccgcgaaggcggcggtggcgagtatccgttgcaggatgggtttggctggactaacggtgtggtacgccgtttaattggtttgtacggcgaaccataatatttttacagccagccgctaacttcctgctggctgtaaaattatcctcttcaggaggagatatttaacatcattgccgcctgggtgcgatttttcacttccagacggcgatacagggattccagatgcgcttttaccgttccggtactgatattcagcgctctgccgatctccttattactttcgcccgccgctaacatggttaaaatctcccgctggcgggcgcttaagcttttgagatctttaatgtccttttccggcgtcgtccgccagtctccaggcagaaacatcatccccatcgccgcactatttaccgccaacgcaaatgtctcgacggtactatcacgaggcacaatggccagcacattaaaatggataacttcctgtaaccaccgtttattgcaatccgtcgccgtaattaacaccttaacctcaggaaattgcaccacggttttttgcagcaaccagtagcaaaactcaccatcctgatcgccatcgagcataactaaggcttcagggtaactttccagcttttgccataactcgtctgcctgactggccccctgaatactcactcctggaatacgctgctgtaaactgattttcattccatgaataaatatactctgcctgtcaaacatgactatttgcataactgaatctccacctgaatacgttaaaaagacttaagtagtggaagggtattacccgcgagaaaaaataagaattcgccatttggcggtggccattctacagagatgacgtgtagaaaatagttaccgatataaatagttacagctaaacgcctgaaattacatgtcgagggcactatttaaaacaattttgaggatttccttatattggtggttagtacgcatgcaattaaaaatgaaattccgcgaccacaagccaaaataacaaacggcaaggagacaaaaataagcacaaatagccaacacgtcctctgttcactttaaagggaatcgctgaaaaatacgctctgtttaaggggattcacctttctcagaaagctattccgcccttttcctgctgagaaatcgccacattcggcatgacaacattgtgaaacccggcattagatgttagaaaaaacaataaacaatgcgatatgcgcgttactgtttcgctgtgaacaacaaagcgtcaaagaaatggataaaattcacgcaatgcagttgttcatcaaagtcgcggagctggaaagtttttcccgcgcagcggatttctttgctttgccaaagggaagtgttagccgccagatacaggcactggaacatcaacttggcacccagcttctccagcgcaccacgcgacgggtcaaactcacgccagaaggcatgacctattatcaacgagcaaaagatgtgttgagtaatctcagcgaactggacggtctgtttcaacaggatgccaccagtatcagcggtaaattacgcatcgacatcccgccaggaatcgcgaaaagcctgttactgccgcgcctgagcgaatttctctatctgcatccgggaattgagctggaactgagtagccatgaccgtccggtagatattcttcatgatggttttgattgcgtgatacgcactggcgcgttaccggaagatggcgttatcgcccgtcccctcggcaaactgaccatggtcaactgtgccagtccgcactatctgacgcgctttggttatccgcaaagccccgatgatctgactagtcacgcaatagtgcgttatacaccgcacctgggtgtacatccgttaggttttgaggttgccagcgttaatggcgtccagtggtttaagtctggcggcatgttgacggtaaacagtagcgaaaactatctcaccgccggtcttgccggtctggggattattcagatcccgcgcattgccgtgcgcgaagccctgcgtgccgggcggcttattgaagtattacctggctaccgtgccgagccgctctcccttagcctggtttatccgcagcgtcgggagctttcccggcgtgtaaacctgtttatgcagtggctggctggcgtaatgaaagagtacctggactgaccgactatactttttaagaatgaccacgacagaaggacaaaagagcggatgacgcaggaaaacgagatcaaacgtcccatccaggatctggagcacgagccgattaagccgttggataatagcgagaaaggcagcaaagttagccaggcgctggaaaccgtcaccaccactgccgaaaaagtccaacgccaaccggttattgcgcacctgattcgcgcgacagaacgctttaacgatcggctgggtaaccagtttggtgcggctatcacctatttcagttttttgagcatgataccaattttgatggtgagctttgccgcagggggctttgtgctggcctcccatccgatgttgctacaggatatcttcgacaaaattctgcaaaacatcagcgatccgacgctagccgccacgttgaaaaacaccatcaacaccgccgttcagcagcgtacgactgtagggcttgtcggcctggcggtggcactttattccggcatcaactggatgggtaacctgcgtgaagcgattcgtgcccagagccgcgatgtctgggaacgcagcccgcaagatcaggagaagttctgggtaaaatatctgcgagattttattagcctgattggtttgttgattgcgctgattgtgacgcttagcatcaccagcgttgccggtagcgcgcagcaaatgattattagcgccctgcacctgaacagcattgagtggctgaaaccgacgtggcgattgattggcctggcgatttccatcttcgccaactatctgcttttcttctggatcttctggcggttgccgcgccaccgtccgcgcaaaaaagccctgattcgcggaacatttctggctgctattggttttgaagtgattaaaatcgtgatgacctacaccctgccaagcttgatgaaatccccctctggcgcagcatttggttccgtgctggggctgatggcatttttctacttcttcgcccgtttgacgctgttttgcgcggcgtggattgccaccgccgaatataaagacgacccgcgaatgccggggaaaacgcagccttaaaataggccggatgcggcgtaaacgccttatccggcatacgattttattcggcctggctccccgtaggccggataagatgcgccagcatcgcatccggctataatgcgcacataacctcttgaaactcgtccccagagcctcttcagccatctatttgggagcaaacaatttcattccaactcataaccccagcatataaatccagttggtaacttttatttaacctgaaaccagttttatccactatttataaaattatgtgaagcatttcatagaagaaaaatcactggcctaaacattatcccctttttgcctgatttttgaccatttccgcgatttgttacacattgaaatatcacttttgctgtgcgtaatatggctattcgttagccaaaaaataagaaaagattatgcaagcaacagccacaacactcgaccacgagcaagaatacacgccgatcaacagccgtaataaagtccttgtcgcctctctcattggcacagccattgagttcttcgacttttacatttacgccactgcggccgttattgtgtttccgcatatcttcttcccgcagggcgatcctacggcagcaacgctacagagcctcgccaccttcgccatcgccttcgtcgcgcgccccattggctctgccgtttttggtcattttggcgatcgcgttgggcgtaaagcgacgctggtcgccagcttgctaacgatggggattagcaccgtggtgattggtctgctgccgggctatgccacgattggtattttcgccccgctgctgctggcgctggctcgatttggtcagggtctgggcttaggcggtgaatggggcggcgcggcgctgctggcgactgaaaacgccccaccgcgcaaacgtgcactgtatggctcctttccgcagctgggcgcaccgattggcttcttctttgccaatggcactttcttgctgctttcctggctactgaccgacgagcagtttatgagctggggctggcgtgtgccatttatcttcagcgcggtgctggtcattatcggcctgtatgttcgcgtgagcctgcatgagagcccggtgtttgagaaagtcgctaaagcgaaaaaacaggtgaagatcccgctgggtacgctgctgaccaaacatgttcgcgtaaccgtactgggtacgttcattatgctggcaacctatacgctgttttacatcatgacggtctactctatgacctttagtaccgccgccgcgccagttgggcttggcctgccgcgtaacgaagtgttgtggatgttgatgatggcagttattggttttggcgtgatggtgccagtcgctggattactggctgatgcctttggtcgccgtaaaagcatggtaatcatcaccacgctgatcatcctgttcgcgctgttcgcctttaacccactgctcggttctggcaacccgattctggtttttgccttcctgctgctggggttaagtctgatgggtctgaccttcgggccaatgggtgcgctgttaccagagctgtttccgacagaagtgcgttacaccggagcaagcttctcttacaacgtagcgagcattctcggggcttccgttgcgccatatatcgcagcctggttgcagactaactacgggctaggtgcggtggggttatatctggcggcgatggctggcttgacgttaatcgccctgctgctgacccatgagacgcgacatcagagcttgtaataagagtgaaaagcctgatgcgctacgcttatcaggcctgaatttccatacaatatattgaattcgcaaggatttgtaggccggataaggcgttcacgccgcatccggcatgaacaaagcacactttgccaacaatctaaatctgtttaattgccggatgtcagacatccggcaattatcatcacttcttcatctggctcaaaatcgtccgacactgattagcctccccttcggaaggactgatcagtgccagtaacgccgccgccggtgttaccagcgttgccagtgccgcagcaacagcaccacgggcaatcagcggtccggctttcaccccagcctgcggatttttaaacgtcccccgcacatacagcgggctacgcagtgtgataatccgaattcctttactctccggatcaatagtcaaatccagctgttcgctagcaaaacttgccgtgccggtaacattaatcaacgcgttctcagtatcgaaagcaaaaatctgcgggcgcgccacgccgttggcaatattcagattcgccgccgcgcagttcacccgcacctcatcatcaccaaatatcgcaccgacaatgtagttgccgacattcagcccaacaatctccatcaggttgcggctcaccagcccgtcattcatcaacagtttcaggttgccgttactgttgcctaaaagtgccgccacgctgttaccgctaccgcgtagttccgcgtcaccgttcatttcccccagcgtcttctgcatcagttccacatcgggcatcagttctttcagtttcagtcgacgagcctgaatatctgcccgcccctgcatcggctttttatcgccttccagatgaatattcgccgcaatgctgccgcccgccatgccaaatttcagcggttgcaggcgcaggtcagcatttttgaggatgatatgagtagaaagatcgctaatcggcaggctactgccatgctcaatgcgccgccctttgaagcgaacatcggcatccataacgtcccatttatcggtttcgaagcggtcataaggcagcactttgcccgcaggctgaacgcttttttcgcccttcttctgttcagaccgtttgctcttttctgcccctttcccggaatcaacgccaatcaacggtcccaggtccgccagccgcaattgccggctctcgacatcaccttccagttttggtcgtggctttccggtggtgtagaccagagaaccgtggatatcgctatcaccaattcgcccattaaaaccgcgataatcaaagacgctgcttttttcagtgtcgattttcgctaccagccgaccatccgtttcaaacggcggggtatcgggcagcagaacgcccgtcagttcatagagatcacccagactatcgccagaaaatttaagccgtaaatcgacaccgcccatcttcattgggtcattcacgacgccatcaaaagcaacacgggtgttaccagagcggaaatcagcctgtaccggaaacggcgtcccttcgccacgcagcgccagcataccgcctatttttcccgtacccgtgagcggttcaccgttatatcgtccctgcgccttcaggccaaaaacgtaatcgcccaccttttctttatccgctttacctttgcttccagtaacttcgctgaacggcagcggcttgcctaagggatcaacaaaaatctccagatccgctttgcttactttgtcatcaatggcgatccgcccttgatcgaaaagaatattatccagccgaaagctccatgcgctcggctttgcattcgcgtctttgttatcatcgttggcaagattaaacgtccagttattgttcttttcagagaggcgaatcaggcgcgcgtcgggcttttcgagcttgatccacggcagccagaccgttttggtcagcagcgccagcggggccagcgttgcctctacgcgtggcaaatgcaccatcgtgacttcgggaatatccggtggattgccaagaatgatgtcttccgcgtgtacatggggccacggcacccagctgcgccagccagtttcttgtttttgccgctcccacaccacgcccagatcgccacggatagcgaacggacgattcaactccgcagagactttctggttgatagtcggtttgagtcgattccagtcaaaagttgcaatcaaaatgatcgccacgacaatcaacaacaagaaagccccactaatcgcagcggttattttgcctgccttgctcatcgttcgcttcctcatattcttcctgtgccagtcctaaagatagtccagccaggcggaaaatgaggcagcttatagcgccagaaccgccgtattcagcgtttctatcggtgccgggcgactaagaaaccagccttgtgcggcgaatgcggggctgttctgaacatcacgccactcttccggcgtttctacgccctcgacaatcaccccgcgacaatagcgattcattagatgtaaaagctgagaaaagagtgtgcgtccttccgggctctgacgcagcatcacaaacagttctcgcgcgattttgatgtagtcataacgcacttcacttagcgcagagaaatttgccatcccggtaccaaaatcatccagccacagcgggccaaattcacacatgctggcaaaggtactatctttcggcagacggatatgctccaccagttcgaaacgcagccagggaagacgctcaatctggcgcaggatttttggttgctgacgcagggcgatgagcgtagggccatcaatattgacgcttgccagcaggccgtgctctataaagaagtcggctttttgcgccagcaaatcaatctgctctttcacaacctccatccgatggctgacggtgatttcagtaaaatagcgatccggcggcaggcgttggctagggttcaagggatgcgtgaccaccgttaatagctccacggccattaaccgcccgcatgtttgatagatcggctgccaggtgtaagcacgctcacactgcaaccaaaaacgccgttcctgcaagctctcgatgcttgcttcagggttgcttattcgctggataacctgccttatcatcaaagatgtcctgtgtttaaaagtgatgctgcccggactcgacaaagattatcggcgcgtaagggcagaactttaccgcctggccggggtaaatttcctcactccacaacggaatctttcaggaatacgttctggctcaaaaaaataatggaacactgttttaatatggttgaccagcaaaccaccacagcgcaaactaacgctaattttttacagatcaggttcacgactatgtccaaaaagattgccgtgattggcgaatgcatgattgagctttccgagaaaggcgcggacgttaagcgcggtttcggcggcgataccctgaacacttccgtctatatcgcccgtcaggtcgatcctgcggcattaaccgttcattacgtaacggcgctgggaacggacagttttagccagcagatgctggacgcctggcacggcgagaacgttgatacttccctgacccaacggatggaaaaccgtctgccgggcctttactacattgaaaccgacagcaccggcgagcgtacgttctactactggcggaacgaagccgccgccaaattctggctggagagtgagcagtctgcggcgatttgcgaagagctggcgaatttcgattatctctacctgagcgggattagcctggcgatcttaagcccgaccagccgcgaaaagctgctttccctgctgcgcgaatgccgcgccaacggcggaaaagtgattttcgacaataactatcgtccgcgcctgtgggccagcaaagaagagacacagcaggtgtaccaacaaatgctggaatgcacggatatcgccttcctgacgctggacgacgaagacgcgctgtggggtcaacagccggtggaagacgtcattgcgcgcacccataacgcgggcgtgaaagaagtggtggtgaaacgcggggcggattcttgcctggtgtccattgctggcgaagggttagtggatgttccggcggtgaaactgccgaaagaaaaagtgatcgataccaccgcagctggcgactctttcagtgccggttatctggcggtacgtctgacaggcggcagcgcggaagccgcggcgaaacgtgggcacctgaccgcaagtaccgttattcagtatcgcggcgcgattatcccgcgtgaggcgatgccagcgtaaacgcagcatatgcaaaaggctggataaagtgttacccctctatccagctcatccataaatacctgatggttgtgctaactcatcaccatcaggcattactgtgcaggtggaatatccgtcacttcaggatgtacgtcatccgtggcgacagaggtggtcgcagcggcggtagatggggccatgatttgatcccagaccgcctgcaacgctttcatgttaaattccggctcgcctttcggctgcagcagtattaacgccatatcattgctcaactgttgacgcagatcctgatttaacatctctaccgtcaggctattaaggaaatcctgccgcagtttctgatattgctccggcgcgatatcgacaacctgattttgcaagctacgcatccgctgacccatcagaatatcggtatcagctcgtgcataggcggcaaacagtttctgcagctccagtttcttttgcgccactaacgcattgaactcttcttccggcagacctttatcgcgaaccttcgccagttcacgcgccaccagattaaggttgctgttcagcttgtcgtttggactttcgatgttgatggcacactgcgcacgcagatacagcacacggcagtcaaatccaagaccgatgtctttgctgttactggcacttaacgcttgctgaacatgccagaacagcgcctcgcgggccaggtccgcacgccagtagcgcagcagtgcggcactttcacgaatcggctgccacggcgtatcccacatgatagataaccggtcctgacgcaccgcgtcagtcataatactcaccgcttccgcacgcagcggagaaagcgtcggcaccggagctggcgtttcacgtttgcctttcagttcgccaaacgttttgtttatttggtcgacaacgctgcgcgcatccacgtttcccaccaccagtagcgtcattgcatccggggtgtaccatttctgatagaaatctttaattttttccgcttcaacgggttgtttcagcggatcggcaggatcgtgacctaacaaggtactccctttcagacgatagcgccaccagccctctttagtatcggcaggccaggttgccaccatgtcctgactttgcagcgcgtggttgatggtttctggtgtgatggtcaatttgccagtggcatttgccagataagagagcgcttctttcagcaaatcgttacggttattgggcaaactcagattaaacagcgtggtgtcataagagacaattaccggcggcatcgggcgtttagggtcgatcccctgctgccacaaactacgcgcctgtgctgcgtcaaggccaccgctttgcgttagcgcaatacgagggatggcgtgactgtaaccgctctgttgtgtactttcggcgaggctaccggtattaaccagcaggcgaatttcaacacgatcgctgggacgctggggggtggtcagcacttgccactgtaaaccgttggaaagcgtcccctgttgccatgctggatcaggctggagcgcatctgcctgcacatagccagcagtggccatcatcagcaaaccgcccgctaaaagtcgaatttttgtgccctgcatgtgaacccctgatcaactatcctggtaataaaaaaactgcccgttgtcggtcagtctaaatgacgttaaaaacacttcgtgttagaccgcaagaacatgaaaatgtcacggaagaagtgaaataaacctgaactcacccaggtggtaagttcaggcacaggggtcaattatgcgcaaacacccgcactcggggaagggagtgcgggcataagtgatgagattaagaggataattcgtgcgttttgccatccggcgcacgattattcagcacatcgtccagttttttgtggtccagttctttcacccacttagcaacgacaatggtcgctacgccgttaccgaccaggttagtcagcgcacgagcttcactcataaagcggtcgataccgaggatcagcgccagacccgctaccggcaaatggcccaccgcagagagcgtcgccgccagcacgataaagccactacccgttacccctgccgcccctttagaagaaagcagcaacacgattaacagcgtgatttggtggacgatatccatctgactgttagtggcctgggcgataaacaccgccgccattgtcaggtatatgcttgtgccatcaaggttaaagctgtagcctgtcgggatgaccagccccaccacgcttttacggcagccgagtttctccatcttgtcgagcatacgcggcagcgcgctctcggaagaactagtccccagtacaatcagcagttcttcacggatgtagcggataaatttgaagatactgaaaccagtcgctttagcgatactacccaataccagcaccacaaacaggatacaggtaatgtagaaacagataatcagctgccccagttgcaccagtgtgccgacgccgtatttaccgatggtaaacgccattgccccgaacgcaccaataggtgccagacgcatgatcatattgatgatgccgaagatgacctggctgaaactttcgatgacgttaaaaatcagttggcctttgctgcccagacggtggagcgcaaaaccaaacagtacggcaaacagcagcacctgcagaatgttaccgctggcaaatgcgccaatgacgctcgccgggatgacatccataatgaaggcgacaatgccctggtctttcgcctgatcggcgtaaaccgctaccgctttcgcatcaagcgttgccggatcgacgttcattccggcaccaggctgcacgacgttaacgatgataagaccaataatcagcgcgatggtactgacaatttcaaagtaaagcagtgcgactgcgccggtacgaccgaccgccttcatgctttccatgcccgcaatgcccgttacgacggtacaaaagatgacaggagcgatgatcatcttaatgagcttaacgaagccgtcgccaagcggtttcatttgctcgcctatttcaggatagaaatggccaaggagaataccaatggctatcgctgtcaggacctgaaagtaaaggcttttaaacagagaggttttcatagggtgtcctttagtaaaaccacaggtcttgtaaggttatggggtacctgcggccttaaaataacacccagacaacatcacagaaatgtacctggatcataattgaaacaaaaaggttaaaaagtttgagctggctcgcacaaaccagcactttttaaagttttgtaatcagtttggggtagttacttttcttccaggtaactctcttcgaagatttcaatagggagtgggcgagcaaaaaggaagccctgggcaataccaacgcccgcttttgccagccagtcgcgttgtgcttcagtctccacgccttcggcaatcatttgtaagttcaggctctgcgccagcatgataattgcagcaatcatgctgctatctcccggcaagccttcaacaaacattttgtcgattttcagtacgtcgattggcaagcttttcatatgctgcagctgacgcagccctgcgtagcccatgccgaaatcatccagcgccacccgaactccggcattgcgcagcggacggaggattgccaccgcagcatgagggtcgtcaatacgtcggctttctgtcacttccagaatcagtgttcccggctgaatgcgatagcgggttaacagttccagcatatccgccaccatattcgggtgcatcagttgcagcgcagagaggtttacgctcaagggcagcataatgccgcgctcttgccaggctgcaagcaatcgacaggactcttccagcacccagtgaccgacggtaaccatcagcccacagcactcaatgcgatcgattaagccatccggcaggtcccaactgccatccggttgctggatacgcagtaacacttccgcactgaccagtttaccgctggtcatctcgacctgtggctgtaaccaaatagcaaactgatgattttccagtgcattaaggatatcgctctcttccgtcaaccgcttctgggcggcttccatctgctgcggatcaaagaactgaatctgattcttgcctttatggcgagcggtaaatgccgcagaaatagcgcgactgtaaagctgttcggcggtgagatcgccgtagaacatcgccacgccaatgctacagtgcggacggagttgaatacgttcaatcggcaggcgctcgctcatgatagtgagcacttgctgacctaaggtgattgcgtgccacggttcctgtacaccgttggcaatgacagcaaagtcataaccgctaatctgcgcgaggatcatacgtgggctcagtacgcttttgagtttttccaccagcgtcagcagcagaatttctcgttgcgcctctttcagcacgcccgcagtatcacgcagggtttcacaggtgatgatcatcagcgcggtggtttgtttacgcgcgacaacctgctccagcatctccatcagcaaggctttgttcggcaaatcgctcaccgggaagcgcatcgcattttcgttctgttcttcataatggcgctgcagcaattgctggttgaggttgtaactgcgcaccaacataccgatttcatcgtcctgatgcagacgcggtaatgccagttggtgaccaacaagctccttggctgggatggcgttaagttcgcgagcaatattgcgtaacggatgcaaaatcaggcggttaatgcaccagctgatggcgacggtcaggataaggctcaaaagtaagtaaatggtcactaacgtactgagggtgctcatcacgaacttatacatacggaaggaatccgcctgtagtaccagataggcaattggctgcgggtttgccggacgttcgaggctgtaaacgcccaggctgatttgaaccggtagctcaaacaggcgagtaaccattaccggcaccgggcgctctggaataaaacttttacgcagcgcctggaactggttaggcagcactacatcggcacggctgaccacgcctgccggtttaatgctggcaagaatagcttccgcttcgggaatatcgcctttcaaaatagcactagataagggttcgcggacagagcgagcaatgctttccagttgcgtagccgtgttatagcgattctgctggaccagatggaacagcaaaacggtgcaaaaaataaaaacgaacaccaggacaacggctgccaccattgccatctgcttgattgttaacgagcgacttacgcgcaaattgtctccccccggaaatcccagattgccgcccgagtatacccgatcgcagcggcattaagagaggcgctatctgaaaacttaccagtcggcgtaaggtatcagcggctgcggcggtaaatccatgtcaccctgccatccggcggcggaataacgtacgtagagcaggaaatggctgggtgcgtaatctttcgcctgctggatatcaattgccgtgccaacaaaccagttggaagtaacacgtcgttcaagtaatgcccgcgccgtgtagccgaagccctgactgctgccgccatcgttggattgccgcgcagcttcttcctgccagtcggtcgggatcagattcatcagcggataacgcggcatggttttggtgcgactatggctccagctgccagacgcacccagctcccagctccagttttccgtgcgctcccgccacatcaccggtatggcaaagctcaggtattcctgcggactgtagtaaccgccctgaccgagactgtagccactcagatctttgtcgtaatgccagatcatgttgttcaggccgattgtgacgcggcgattgttctggttaatgaccttatagtaatagcccgtcatccagcgcacgcgccagttatcttcgacatttttaccggttaactggtcgccactaaggcttgcccagacgccgtttgcttcacctttatcgtagctcagacttagccccacaccgtcggcacgtacgccaccccattttttcccggtattgctcggggagtctttttgcccaccaaaggccagcaaagaactggagatgggccgacggtgggcgttaacggtgtaacccagcggcccgatatcatcgctgtaactgatgccgccgaccacatccaccacgttgaagcccatcggcgtggtaccgatatcccagctccagacgtcatttcgccagccgaccgccacgctggcaccggaatcgctctggctgcggttgccgctacagtcctgtaatgtacaggtgccccagttgtcatcccatttgccatcggcattagtggagaaactgccgacgttcatattgacgaaatcactgcgaaagaacatccgcccgtcagaatacggcgcatccacctgcaacatggtagtgtgcgctttcagatcggagtaaccaccggtgccgctgctaccccagtaatcgtgctcaagggtgacgttaagatcctgctggcgatagaggtccgccgcatcgctgcgcacgccacgtttcagccagtcatctttctcgtcgttacgggtcagtcgggtaaaggtgtcgttatcctgcggacgcgtcgtagtcacaccggatgcgaccatggcgtctttgtaggtttccagcgcctgcgttggatcgcccgcctgcgcttcaaacttcgcaccatcacgcagcaccatcgcgctttccatgctcggtggctgagattttgcctgcgggatcaacttattaaacgtccgctgcgctgctgcggtatcgccaagctgcgcctgtgccagcgccacgcgccgctgtgtgttcaggctggcgttatcggtagcgggcagtttcgccagctggctacgtgccgccgctttgtcaccggcagcaatatccacttccgtcagaccaagaatggcgtcggcgttagctggctcccgcgtcaggacattctgatatgcagcgcgggcggcggtgtaatcacgtcgttgttgcgcccagtcagccagcgtgaggtcaatacgcgtggaaggtggttgctggcgcagcatcgcttccgcttctgcctctttgccgctttctcgcaggcggttagcggtttccagcacctgatcgctttgcagtcgattaaccagctcctgaatattgctgttccactgcgcacgcggcaggctattgatatgcgccagcgccgctctgtcctggtcatgaccagagaggtacagcccgtaagcgtaaacctgctccgggtcgttgctcttctgctgcgccagattgcgcattaacgtatcggcctggctgcgttgtccggcctgccagagatcctggctaagtcggtaagtaatccatacgctgccggggtccagcgccagtcgttgccgctgaagtgctgccgcctgcgcccatttgccctggttttccagtgcctctgcctgctgtgccagacggtcgttttgcaggctgcgttcgatatcatcaatgctacgccgctgactggcagagaggctggcgataaacgcttcagctttttctgggctttgctggcggtaaatatttgccagcccgcgcacggcgttagtgttgccgctgtccatacgcaaggtctgctgataataacgttcggcggcgggataatcttttcgcgccatcgccacatcgcccagccccagcactgcataactgtcggtgttatcgacattacgcgcctgctggaacaggcgttctgcccggtcaggattattggctttcagcgcagcatcgccctgctggatcgccagccagtagcggtttactttcagcagactgttccatttgtcgttgttgctgctgtgcgggtccagtgcgagggctttttccagattcgccactgcattggcgcgatcgcctttctgagaatacgcctggcccagcgcccccagagcttcactgtctttcgggttcgcccgcaccgcctgttgtagttcgggaatggctttacccgccataccagagtccaccgccgctaaaccttgcgcacgagcgcggaaagcaggatcggccagctgtttttgctgttctgccagttggctttgcgcagccgccacgctatcgccatcactaaagatgctgagatattttttcagcgcgctcacactggcatcactgacgggcatgtctttaatctgcccgtaccagattttagaggccccttcgcgcccggcgttgctttttgccatctgttccaggacggcaaaaccttcgtcacggcgatcgctactaaacagcaatagcgccagattgttttgcaggcccgtattgcccggtgcatccgcattgatgcgttttaactgattaatcgcttcgccacggcgagccggaattttcgccaccgtactccagtactcgacagcaatgtcaccttccggcggcgcaccgttgaacagtttgttgtaactcgccacagcttcttctgcatgaccggtcgtcgcctgcaatcgtgcctgttgcagtgcctgacgaccatccggcgtggaaagtagcatcgtagtccggctgcttttatacgcattactactcggcgctaactggctcagccgatcgagctgtttttgcgcgccatcaatatcgccctgacgtaacaaagaacggaaacgggcggcaacgacgtccgggttattcggatcaataagttccagccgatataagctctgttgcaccagatcttcacgatgggtcgcttcgcctaaccgaacttgctccagcaactgttgctgagcggttggtgctgcctcgaccatcggcatgacggccagaccgagggaaagcgtgaatatgtttagtgtgaatttgcgcattcctggccccagtcaggtaattactttagtgactatttgcgcattcctggccccagtcaggtaataactcaccttttgtgctgaagcggaaacggtgttgatcccagccttgtccaaacagggtcagcacatagttgtaataggcatcgctgccgggaaagttatcggccacgcgctggcgctgaacggcctgcgcatcgcggttttgtaaaaagggcagcatggcggcagaaaaaccgactggtcctttaccctgcgctttccccgtagccacatccactttttccggcggataaccgtttttctcagtgaatgtcgccatcggtttaaaccggttgagcatccgcgctttttgcggatcgctgtcaggcatcatgcctacccacatgtaaacgcggatagcgtcgtagctgctgatcaatgttttttcggcttttagctgccagcctttgtctttctcatagcgcacccagtctgggctaaaacctttcggggcggtttccagcaataaacgttgattggtttcgcgcagcgtggtccacggcgcgccaaagcgggtgaaatactgcgccagcgtcggcggcaggtagctggggttaaaacgccagctgttatcctcagcaaaacccactttgcccggtaacaacatggaacccagcccaggcaccgtcaccacttcctcccgcgcgatacgttttagcaacgcgctgccgatgtcggtataacgctgctctttccacaaacgccccgcctccagcaagctccaggccatccagacatcaccatcggaggcgctattgctgtccagcacttcccacttactgttctctttcttgccccacagccaggcgggcaaacgttcttttaaagaaccctgagcgagattgttctgcgtccagtcgagaatattatcgaaagctgcacggtcgttagccgccagggcagagaacatgccgtaactttgcccttcggaggtggtgattttgcgcgcgtcgctggggtcgatgacgcgcccttcctgactgatgtaatcctttttaaactgctcccaggcaggccaggtacaggctgcctgaacactaaaggcagccagcagcagcatcgtcacgattccactacgcaacacattcatcttcaattactcgttatccgggttaagacgacgacgactaataattcgcagcagacgccacagtacccatgccagcaatatcacactgatagccgccagcaccgccagcagaatcggatggtttgccagcgcataccacacgcgctcgaaccacggcagatgacctacgtaataaacgtcgccaacacgtaggctgttgataccggactcgcggatcaccgcgacgctaccgaacatggtggcgcgtttgccgctatcgttcaccgcatcgttaagcatttcataaccgcgtgggctatctgccaacagcgcaatcacgctgcgctggtcgttatacgggctctggaagccaatcaccgccgccatcgcaccggaagaggtcagcgtactccgggtttctgccgcgcgatcgctctcgtccggcacaatgccggggaacggggtctggcgcatcggtgttttcacccagctttcggtcgcctgcaccaataggtcgatctgcttatcgtctttcagtttgtccgggataccaccgatgatcatgatgtcggcatctttgccctgaatggtgctgccatcatcggtcaccgtcagattaatcgccgggaagcccgtctgtgcgccgataaaaccaacagtattcagcaacgtttccatctgtgcttcgttaggcgctttcggcatcacggtgatggtttggctcagatccgccatccggctgaatgggaagcccgcgttagcaaaggcgcgtagatccggcatcgggatgaagtggtaatacttgctgaagtcgatggtggagtcgtcaccaatcaccacatgattctgcaccggctggaaggtaatacagttatccacgctaccgcccggcatcgggttcatatactcaaagtcgaagcgcagctggttggtcgcgcccagtttcagcgccggaatagagacatctgttttgccatccagcaaaccttgtaataccggaatccgcagcagcaggcggttcgcctcctgtttgctgctcaggttgaaggattgcaggaactggttattcaggctgatatccatccggctactgtctttcaccggcggcatggtgtagcggtaattaatatccatatcaatgccggtactgcgcatcaggtagagatccggcggcaggtttaggctaacgttaatcgctgctggctcaagaccgctggattgtaactgttcttcataggttttcagttcgccaaatgtgaccggacgatcggtacgtacccagttcggcgcatcgtacggcttacgcggtagcagcggtttcacttcattcactaccacgctttcaccacggaacagaatgttaccctgagcgatacctttcgctgcctgcaacaggtctttgtcgtcacgaccaaacaccaccagcagtttgacgtaaggattctgcggatggttaatcatctcaatcaccggggcttttaccgccggatgatcgcgcaggaagtccggccgtttgtcgttggttgcaaagacaatggcattgcgatccggcagttggttatagagtaccgggaagttctgcccacgccagccagaacggctaccaaaccagctggcgacaatggcagaggcttgttgcagcccaacatccggcgcacccgcaaagaccatcggcaaggtgttggtgcggttatcgctcgggtcaaagaatggcaccgggaagtgactcaggtcattcttcacattcagggtctgataggtcagatccagtccactgctccgcccaacatccagccaaagcgtggtgctggccggtttttcgcacacgtcctgataatggccgacaaactccagccgtacacggttgaagtcgctaataaacagtgggttaatgggcatttgcgccagcgtttttttacccaactgttctttggtcactggcagcacgcccatcagttcatcattgagataaacctttaactggctctggacaggcagtaagcttgggcttggggtgtattcgaggttgagcatcgccttcgtcaccacttcatcgctgcgcataccaaactcaatgctgccgttcgggttaatgccacgtagcaccatgctgcccggcggcggtgcaatttgcgcaaaggtcagcttcacatcacggctaggaccgttctgcgccacgactggcgcatcagcgccctgcacgcccggcatcacttgccccacctgcggattttgttccgtctgggcggctacagctggctcagcattgatcagtggttgcgttgctggcgtcgcctgcgtcatgaaagaggggaacgcactcatccccatagccactgcacaaatccagaatagttttcttttcatcgcgttatcatcattgttgagccaaagcctgatcgcttggttgtgccgtttcgctccgctccgggcggcgcggaataaagcttacaacccaggaaaccagagaagtcagcacacggaatatgcccttcacgctagaaggcgcaaactccgccagatggcggtagccacggaagccgagcttcagaatatccagcagactttccagcggcttatcttccgggtagctgtcctgccagagcgcccatgtatccgcacgggcaaacgtacactgcacaaaatcgatatgttgctgggtggtgagcggcattaatttcagcccaacttcattacccatcacgcgcgccacctgggtcgggaagacgtattcctgctgaccgcgtttaagcaacagattcactttctgcccttccagaatctgcgcctgaccgttgatcttgatccccaaaccaccgtcggagaaatcctgaacggtacagctgaagaggtgaccatcttcgcgggcaattgccgcgggcatcgtcatctccacgcggtggcttcggcgtacctgtttgctttctacgcttaccgcaactgcgccgccaagaacaatcaggttgtagaacacccacaccatactgacgaccacggtgagcatctcggttggcgggccatagaagtagcgccagatgcctaccgcaacgcccaccaggttgagcaggacaaggaagatgtagggccggctgatcacccagtcgacgtactcttcttccaccagtccacctttggcggtgacgttaaatttgcctttgtgcgggttaatcagcgccaccagcgtcggtggtgcgatataccacgccagcaccgtttcgtagatttcactccagaaagagtggcgatatttgccctggatcttggagttggtcaggctggcatggatcatatgcggcagcacgaatagggcgatcatcaacgctggcgcatagatgatgtaggcatgaagcagcaggaacgccagcggcgcagtcaggaagatcagccgtggaatgccgctcaagaagtggaacatggcgttgacgtaacatagccgctgagcaaacttcagccctttaccggtgagcgggttatcgagacggaagatttgtaccatcccgcgcgcccagcgaatacgctgaccgatatgcgcgctcagactttcggtcgccagccccgccgcctgcggaatacgcatatacgcggaggtatagccacgacggtgcaaccgcagagaagtatgcgcatcttcagtcacggtttcgacagcaatgccgccaatttcatccagcggcttacgacgaatcaccgcacaggaaccgcagaagaaagtggcgtcccacatatcgttgccatcctgcaccagaccatagaacagcgtgccttcgttcggcgttttacggaaacgccccaggttgcgttcaaacgggtccggactgaagaagtggtgcggcgtctgcatcatcgccagctgtttttctttcaggaaccagcccatggtcatttgcaagaagcttcgcgttggtacgtggtcgcagtcgaaaatgctcacgaactcgcctttggcatatttcagcgcattgttgatgttgcctgctttcgcatgttcatgagtggtgcgggcgatatatttcacccccacgttttgcgcaaactggcgaaactcttccctgccgccgtcatcaaggatccagatattcagcttatctttcggccagtcgatacccaggctggcgtaaatggtatttttcaccacgttgagatcttcgttgtaagtcgggacaaagatatccacgctcggccacaggctcatatctttcggcaatggcaccggctgacgattcagcggccatactacctggaagtagccgagcaccagcacaatccacgcgtacgtttcagcgaagagcagaataagcccgcacaccaggctgaccggatcgtcccagttcagcgtagaggtgtaacgccaccagatataacggcaagaaacggtcaggctcagcacaatcaacattagcgcgctgaagcgccccggcatccgccgtacgatcagcgctaccccccacagcagcatcaggaagataaactgcgccagcgggttaaacggctgagtaacgcagattaacgccagaatcaggctgaaggtgacgatgataccgaggatcaaccgccgcgccccggcactcaaatgaccgagctcttttttctcatccagatgctgtgttttatggctaacgcgctcaggcagctcgttcatccattgatggtaacgtccacgaatattttgcagaccactaaatgcccgcctgcgcggtttcggcgtttctttgcggcttgcaccgatcaataaccagcatgtttgaatgagataacggaccgggtccagcggacgcggacggctggcgttgatatgcggatacaggtttttatgttctgcgcgaatacgctgccagcgcgggtgctccagcggaataaaaatccaggccaggatcatccagaaacagccgagcgtcgcgctgaaagcgctcgcaccgtgacgacgataatcgcgataacgcccgataagccgcgcgttgaccggcgggataagcaaccaccgggtcaggatactcatgatgcactcccgactggcgtttacatcaacttgcactcccgactggcgttttcagcccggagtagttcaacaggcaccagttcgccagcgtcagtatctcttcagccgccagcgcatcactgcgatattcacctactggttgcttagccgccaggcattcagccatcgcttcatcacgatgaatgagcatcggcagtaatcggcgctggctttgcaaccaaagctggtaaatatcgtcctgaacctgactgccaatacggaagtcattaatcaaaatatgtgcgccatccggcagcgcttgctgatgcagtcggatatggcagttggcatccacattgacgattgccaggctgtgatcgcacaaactcagcagctggtgggttatctggctggcatcacgcggtaagtcgattaaaatccactggtaacgcccgctggcttttagttgctgtaagccggagcaaatatcgctcagccgggtttgccagtgctgtggattttcttgttcttcaatggataactgaccaaaaggcagcaaatcgagctggctggtgtagcgcaacccagcgtcacgccagtcctggccatccagcatcgctctggcccagccctgacggtgggtaaaatcaacattaaaactcaggcgcaacaagttgtccgggcaggcatcgaccaccaggacattttctcccaacatttgtaaactccaggctaatgcggcggtgatggttgttgtccccacgcctccccgcaccccctgctatcccagtacggccattcaccaatcccttacttttgttgcgcaaactctgccagcaacggccagcgttttaatgccgcggccaactgttcgcgttgggaaatatcggcataatcaatatcaggcagactaaatgcctgctttaacgccacaatatcattctggaagatatagcctatcgcgggatcaggcagagtatctggttcattgttattcattttgcttgatccctatgaaataaccgtaccgttcatgagacaattctaaccgtgagcatttcgccggtttattgtttacggcgagacgggaatttgctcactttttgactttccgttacgcaacagaaaaagttaaaaacgaaaagactaaaatcacacgtcttgtgaccttctaaattgattcacatgctaaatctgataagttttaatttcaatggtaggtttatttcttagctttcgctagtaaactgataatcagacaaaatggtgacatgagggacattgtggaccctgtattctctatcggtatcagtagtttatgggatgagctgcgacatatgccagcaggcggcgtctggtggtttaacgtcgatcgccatgaagatgctatcagtctggcgaatcaaacaattgcatcccaggctgaaaccgcacacgtcgcggtcattagcatggacagcgatccggcgaaaatctttcaattagatgattctcaagggccggaaaaaataaaattatttagtatgctaaatcatgaaaaaggtctatactatttgacccgtgatttgcagtgttctattgatccccataattacctttttattcttgtttgcgcaaataacgcatggcaaaacattcctgccgagcggcttcgcagttggttggataaaatgaataaatggagcaggttaaaccattgtagccttttggtaattaatcccggaaataataacgataaacaatttagtttgttgcttgaggaataccgtagtctttttggtcttgccagtttgcgttttcagggtgaccaacatttgctggatattgccttctggtgcaacgaaaaaggggtcagcgcccgtcagcagcttagcgttcagcaacaaaatggtatctggacattagttcaaagcgaagaggcggagatccaaccacgcagcgacgaaaaacgcattctgagtaatgttgctgtactggaaggtgcgccgccgctaagcgaacactggcaactgttcaacaataacgaagtcctgttcaatgaagcccgtaccgctcaggcggcgacggtggtcttttctttacagcaaaatgcgcaaatcgagccactggcccgcagcattcataccctgcgtcgccagcgcggtagtgcgatgaaaatcctcgtgcgggaaaataccgctagcctgcgcgccaccgatgaacgtttgttattggcctgcggtgcaaatatggttattccgtggaatgcgccactctcccgttgtctgacgatgatcgaaagcgtgcaagggcagaagtttagtcgctatgtgccggaagatatcactaccttgctgagtatgacccagccgctcaaactgcgtggtttccagaagtgggatgtgttctgtaatgccgtcaacaacatgatgaataaccctctattacctgcccacggtaaaggcgttctggttgccctacgtccggtaccgggtatccgcgttgaacaagccctgacgctgtgtcgccctaaccgtaccggcgatatcatgaccattggcggtaatcggctggtgctgtttctcagtttctgtcggattaacgatctggataccgcgttgaatcatattttcccattgcctactggcgacattttcagtaaccgtatggtctggtttgaagatgatcaaatcagtgccgagctggtgcagatgcgcttgcttgccccagaacaatggggcatgccgctgcctttaacgcaaagttctaaaccggtcatcaatgccgagcacgatggtcgccactggcgacgaataccagaacccatgcgactgttagatgatgctgtggagcgcagtagttgatataagatgctgtggagcgctcatcatgatgaccatcagcgatatcattgaaattattgtcgtttgcgcactgatatttttcccgctgggctatctggcgcggcactctttgcgacgcattcgcgacaccttacgtttgttctttgctaaacctcgttatgttaaaccggccgggacgttacgccgcacggaaaaagccagggcaaccaaaaaatgactcaatttacgcaaaataccgccatgccttcttccctctggcaatactggcgcggcctttccggctggaacttctattttctggttaagttcggcctgttgtgggcgggatatcttaacttccatccgctcctcaatttggtgtttgccgcgtttctgctgatgccccttccgcgctacagcctgcatcgcttgcgccactggattgccctgccgatcggctttgctttgttctggcatgacacctggttgcctggcccggaaagcataatgagccagggtagccaggtggcggggttcagtaccgattatttaatcgaccttgtcacacgctttattaactggcagatgattggggccatttttgttttattagtggcctggttattcctgagtcaatggattcgcattaccgtttttgtggttgccatactgctatggctgaacgtacttaccctggcgggaccaagtttctccttgtggccagccggacaaccgacgaccactgtaacaacgacgggtggtaacgcagcggcaaccgttgcggcgacgggtggcgcaccggtagtgggtgatatgcccgcacaaactgcaccgccaacaacggcgaaccttaacgcctggctgaataatttctataacgcggaggcgaaacgtaaaagcaccttcccgtctagcctgcccgctgatgctcagccatttgaactactggtgattaacatctgtagcctttcctggagcgatatagaagccgccgggttgatgagccatccactgtggagccatttcgatattgagttcaagaactttaactccgccacctcctacagtggcccggcggcgatccgtttactgcgcgccagctgcgggcagactagccacactaatctgtatcaaccggcaaataacgactgctatctgtttgataaccttagcaaactgggctttacccagcacctgatgatgggacataacggccagttcggcggttttttgaaagaagttcgcgaaaatggcggcatgcagagcgaattgatggatcaaacaaatctgccggttattttgctgggctttgatggtagcccggtttatgacgataccgctgtgcttaaccgctggctggacgttaccgaaaaagataaaaacagccgtagtgccacgttctacaacacgcttccactgcatgacggcaaccattatccgggggtcagcaaaacagcggattacaaagcgcgggcgcagaaattctttgatgaactggacgccttctttactgaacttgagaaaagcggtcgtaaagtgatggtggtcgtggtgccggaacacggcggcgcgctgaagggcgacagaatgcaggtatctggcctacgtgatatccctagcccgtctatcaccgacgtccccgttggggtgaaattcttcggcatgaaggcaccgcatcagggggcaccgattgtcatcgaacaaccgagcagcttcctggctatctccgatctggtggttcgcgttctcgatggcaagattttcaccgaagacaatgttgactggaaaaaactcaccagtgggttgccacaaacagcaccggtctccgagaacagtaatgcagtagttattcaataccaggataaaccgtacgttcgcctgaacggcggcgactgggtgccttacccgcagtaagaacgaaaaaggccgcagagtttcccccctgcggcctggtccgggcgcaaattgccattacggcagcctgacgcccgcatgacacgttacttccgcttgttcagccagttcacgatcatactggcaagaatgccagcaatgaccggagccgctaaatcatgccagaaggccatgcccagctctgcgaacgtcatatagccgcctgtgttgtaatgacaacgtttcgcggctattcttgagtggtctagagtcaagattagcccccgtggtgttgtcaggtgcatacctgcaacgtgcgggggttttctctctccagcaaccaatgccaccagggataaagcccccgcaacattgcgcctcaccggaacctttccggcttgccgctgattctacgattgctttttactgtcagcacccggcaatcttcctcattgcgcgatgccttccagcttaatttctttatttgcaatagttgcagttcatatccgggctgactccagactggtagtgaaatgcgcaattttgtagaattgcgcctcctcgcgacctccccagtgaatctgttgcctcattttttacatactgcgtattcgacttctccacctgttgcgcaagagaaactgggtttattcatttttgcgaggccgacttctttctggacaggactttatgcagcacaacacactaagcaaacacaatcagaaattgccgtttacacgctacgacttcggctgggttttattatgcataggcatggcgattggtgccggaaccgtgctgatgccagtacaaattggcttgaagggaatttgggtatttattaccgcagcgatcattgcttatcctgccacctgggtagtgcaggacatttatttaaaaaccctttctgaaagcgattcctgtaatgactacaccgatattatcagtcattacctggggaagaactggggaattttcctcggggttatctactttttgatgattatccacgggatttttatctactctctctccgtggttttcgacagcgccagctacctgaaaaccttcggtttaaccgatgccgatcttagtcaatctctactttataaagtcgctattttcgccgtactggtggcgattgcgtctggtggtgaacgattactgtttaagatttccgggccaatggtggtggtcaaagtagggattattgtcgtgttcggttttgcgatgatcccgcactggaatttcgccaatataaccgccttcccgcaagcctccgtctttttccgcgatgtcttgcttaccattccattttgcttcttttctgcagtatttattcaggtacttaacccaatgaatattgcctatcgtaaacgggaagcggataaagtactggcaacccggctcgcgctgcgtacccaccgaattagttatatcacgctcatcgcggtgatcctgttttttgcctttagctttaccttcagtattagccacgaagaagccgtttctgcctttgaacaaaatatcagtgcactggcgctggccgcgcaggtgatccctgggcatatcattcatatcacctctacggtgcttaatatctttgccgtactgaccgcattctttggcatttatctcggtttccacgaggccattaaaggcattattctcaatctgttaagccgaattattgataccaagaaaattaacagtcgcgtgctgactctggcgatctgcgcttttatcgtcattacgttgacgatttgggttagctttcgtgtaagcgtgctggtgttctttcagttgggaagcccgttatatggtattgtgagctgcctcattccgtttttcctgatctataaagtcgcacaactggaaaaacttcgcggatttaaagcctggctgattctgctgtacggcattttgctatgcttgagcccactgttgaagctgattgagtaaaccggagcgcatggccccggttttgtgagttaacgctgcggattttcatcctgatcaacagcaaaacaagctaccagttgaccgccgtagtcttttagctgcggctgcaactgggtgcaggggccgaagcgccgacgacagcgggcgttgaaggcgcaacccggcggtggattcagtgggcttggtagttcaccgctgagcttgatgcgctcgcggcgatcgtccgggttcaggcgcggcgtcgcggaaagtagcgcctgagtgtacggatggcgcgggttattgaagatttggtctttcgttcccttctccacgcagcggcccaggtacatcaccatcacttcatcagcaatgtgctccaccacgctcaggtcgtgggagataaagacataagacagccccaactcctgctgcaaatccatcatcagattcagcacctgcgcgcgcacactaacatccagcgcggaaaccggttcatcggcaatcaccacatccgggtcgagcatcagaccacgggcgatggcgatacgctgacgctgaccgccggagaacatatgcggatagcggtcatagtgctcggttttcaggccgactttcgccatcatgctcagggctttttcccgacgctgttctttgcttaagctggtgttgatcagcagcggctcttcaagaatttgcccgacttttttacgcggattcaggctaccgtaagggttctggaagacgatctggattttctgccgacgcagcttctgcgcctgcggatcgtgcttaagcagatcctgcccctggtaatacagctcgccaccggtgggcatttcaatcatcgtcagcaaccgaccgagggtgcttttaccgcagccagattcgcccactactgccagcgttttgccacgttcaaggttaaagctaacgccatccagcgctttaaccagacgttccggcgcgaacatgcctttcttcaccggataatgttttttcaggtcgatagcctgcaacagcggttgttgcagggtggcctcttgcgtactcatagtgtcggcctcccggcatcatcaagtgggtaatggcatttggactgacgcccgtcagcgagcatattcagcgccggttcttcagcgcgacatctgtcagtggcataggggcagcgcgggttaagcaggcagccgttcgggcggtcgtacttgccgggaacgacacctggcaagctcgccagacgttctttgtcctgagcaaattctggcagcgcacgcagcaatgcctgagtatacgggtgacgcggcgcatggaagatggcgtgcgcatcaccggtttccaccacctggcctgcatacatcacgatgattttatgtgccgcttccgccaccagcgccaggtcatgggtaattaacaccagcgccatgttctctttctgctgtagctccagcagtagttcgatgatttgcgcctgaatggtcacgtccagcgcggtggtcggttcatcggcaatcagcagttttggccgacaggcaatcgccatggcgatcatcacgcgctggctcatgccgccggaaagctgatgcgggtaaacatccagacggcttgccggatcgggaataccgacctgattcagcaggtcaatcgctcgctgacggcgggtacttttgttgccgccctgatgcaccttaatcgcttccataatctggaaacccacggtgtagcacgggttaaggctggtcatcgggtcctggaagatcatcgccacttcggcacccaccaggttgcggcgctctttttcactgatacgctgcaaatcctggccgttaaactccagtttttctgccattacgcggcccggataatcaatcagccccataatcgccagactactgacgctcttaccggagccggactcacccacaatcccgaccacttcgccctgttttacgctgtagctgatgcggtctacggcgcggaacggcgcgctttcgtcgccgaaatgcacgcttaatttatctacatttaataacgccatctcgaacctcttactgcttcagtttgggatcgagcgcgtcacgcagaccgtcacccatcaggttaaatgccagcaccgtcagcaggatcgccagacccgggaaggtcacgacccaccaggcgctttgcgcgaactgcaacacgtcggagagcatggtgccccactcaggcgttggcggctgtgcccccatgccgaggaaaccaagagcagccatatcgagaatggcgttagagaaaccgaggctcgcctgaacaatcagcggcgcaaggcagttcgggaagatgttaataaacatctgacgcatcgccccggcacccgccacgcgagacgcggtgacgtaatcgcggttaacttccaccagcacggcggcgcgggttaagcgcacatagtgcggcaaggcaacgaaggtcagtgccagcgcggcgttaccaatgctcgggccgaaaattgccaccagcaccagcgccagcagcagacttggcagcgccagcatgatatcgaccacgcgcataatgatgttatcgaccaggccgccaaagtaaccggcgatcaggccgagaataacgcccataatcaggcttaacacaactaccagacagccaaccagcaggctcaggcgcgcaccgtacatcaggcggctcagcacatcacggcctacgtcatcggtgcccagcaagtgcgccatgctgccgccttcctgccaggctggcggggcgagcagtgcatcgcggaactgttccgccgggttatagggtgcaatccagttggcaaagatcgcgatgaacagcacgatgacgacgtaaaccagcccgacgaccgcgcctttgttgcgtttaaaatagtgccagaactcctgtaacggggtcatcggcaccggtgcgctaatcactttattttcagtaacctgactcatgatgtccccttacttcttatgacgaatacgcgggttcaccacgccgtacagcagatcgaccagcaagttgacgaggataatcatcgtcgccaccagcaatacgccgccctgcactaccggatagtcgcggcgttgcagtgcgtcaatcaaccagcgtcccagaccgggccagctgaagatggtttcggtcagaatcgcccccgccagcaatgttcccacctgcaggccgataacggtcaccaccggcagcatcgcgttacgcagcgcatggacgataatcacccgcatgcgggttagccctttggcgcgcgcggtgcggatgtaatcctcgcccagcacttccagcatgctggagcgtgtcatacgcacaatgaccgccagcggaatagtacccagcacaatggcaggcaagatcatatgggcgacggcatcgataaagttgccgtcttcaccccagatggcggtgtcgattagcataaaaccggttaacggattggagtcatcgaggaacaccatatcgctcacgcgaccggagacgggcgtcaggttccagtgcacgctaaccagcatgatcagcatcatgccccaccagaagataggcatactataacctgtcagcgccaggccaaccgctgtgtgatcgaaaatggaaccgcgtttaaccgcagccagcacgccgaccggaataccgactgccgtagcaaaaatcatcgcgcagacgccaagttccagcgtggcctggaagcgcggcacgaactcttcccaaaccgggatgcggcttttcatactaatgcctagatcgccatgcataacgccccaaatgtaatggagatactgctgccacatcggtttatctaagccgagttcagccagcagctgcgcgtgacgctctggggagatcccacgttcgcccgccatgatcatcaccggatcgcccgggatcatgtggacaaaggcaaatgtgagaagggtaataccgataaacgtggggatgacgagtcccaaacgtcggagaataaactgcaacataacccggattctctatagtgacccgcagcctggaactgcgtgtctgtattgctcacaaatcaattcccgcccttatcggacagggaatgaagtattgctgccggatggcgctgcacgcagaggcacagcgccaccgggtatacagattgttgacaaagtgcgctttgtttatgccggatgcggcgttaacgccttatccggcctacaaaatcgtgcaaattcaatacattgcagaattttcgtaggcctgataagcggagcgcatcaggcatttttgcctttgccatcagtcttgtatggcttttaattattcgatagagacgttttcgaagtgatgtttgcctaatggatcaaccacatagcctttaacttctttacgtaccggttcaaacacggtggagtgagcgatgatcagtgccggagcctgatcgtgcatcaccacctgcgcttgtttgtacagttcaacgcgtttattgtggtcgtcggtagcacgcgccggttgaatcagatcttcaaacggtttgtagcaccatttactgtagttggagccttgttcagaggcggcgcagctgaacagggtggcgaagaagttatccggatccccgttatcgccagtccagcccatcattaccgtctggtgctcgccatctttcgcacgcttgaggtactcaccccattcgtaggtgacaattttggcctgcacgccgactttcgcccagtctgcctgaatcatctccgccatgcggcgagcgttcgggttatacggacgttgtaccggcatcgcccacaggtcgatggagaaacctttttccagacccgcttctttcagcaaggctttcgctttttcaggatcgtaggtgtagtcctgaacgtcgtcgttatagccccacatggttggcgggatcaggtttttcgcacttacgcccgcgccctgataaaccgctttgatgatcgcgtctttgttcaccgcgtaggtcagagcctggcgaactttcacgtcatcgagtggttttttctgcacgttatagctgagataaccgacgttcagccccggcatttccatcagattgatggatttatcctgcttcatgcgagcgatatctgccgggttcgggtacggcatcacctggcattcattcttctgcaatttcgcgtaacgcacggaagcgtcaggggtaatagagaaaaccagcgtatcgatctgcggtttggtgccccagtagccatcaaacgctttgtagcggatacgggaatctttttgatactgctgtaactggaacggaccggttccgattgggttgaggtccagtttttccggtgtaccggctttcatcatcgcatcagcatattctttactcagaatagaggcgaagtccattgccaggtcagcgaggaacggcgcttccgggcgagtcagcacaaactgaacggtgttgtcgtccacctttttcacttcactgatcagctctggcaagcccatgccttcgaagtattcgtagctgccgccagaaactttatggtacgggttttgcgcgtttttctgacgatcgaagctgaacaccacatcatcggcgttcagttcacgcgtcggtttgaattctttattgtcgtgccacttcacacctttacgcagatggaaggtataggttttaccgtcttcgctgacttcccacttttcagcgaggcccgggatcacttcggtggtgccgattttaaattcaaccagacggttataaagcgggacggaagaggcgtcataggtggtgccggaggtaaacagctgcgggttaaacccttccggagatccttcactgcaataaaccagagttttagcctgaacacttgctgcgacggtcatagccaccaggctgagaccaagcttcagcatcccactctttttcaaggaaatacgcattattctgctccaattgtgatgtttgttgttttaaccctttgcagtgggttgtcgctgcctgaccttttttgttttttgcccggtcgggtcaacgttatgaggtggggatgccgtactaattaacatcagtgtaacagtgcggatcctccataaaatgcccctcgtgacctacaatctgtcaacagaatgtgaaaacgtcaatacagccaaccgggatttacaccaacggtgagaatccacacacaaagattaaaaaaacttcaaacagctatttgcagcagagaaatttgtgctactccaacatgaccagaacaatcagcttaatatttagcaacatttggtgattaagttttatgcatttaatgaaaaaaatctgaggaaaaggtggatatctgagcgattaataccatgaacgctaaaacgcacagcggaaaatgccagggccagccataagtaacgcaaaaaaagatttaagcaaatataaaaaaagacaatggtttctgtcacaaatccgttaatggatagtgagatatggggcgcaaatttggcagggaaatgtgtgtcgtgtaggtcgaataaggcggtcgcgccgcatccgacaatggccggcacatttgcctgatgcgacgctgacgcgtcttatcaggcctacgtcgagtcgaacctccctgcccccggaggttctcatcctcatgagctgcagatgcaaaaaagcctgctcgttgagcaggcttttcgaatttggtcggtgatagaggattactcgccacttcgtggctcgccctgcgggccgttgctggcgcaacgttctctcgcttcgctcgagtcgaacctccctgcccccggaggttctcatcctcatgagctgcagatgcaaaaaagcctgctcgttgagcaggcttttcgaatttggtcggtgatagaggattcgaacctccgaccccttcgtcccgaacgaagtgcgctaccaggctgcgccaatcaccgaatgcggggcgcatcttactgcgcagatacgccctcgtcaatcccttaatagcaaaatgccttttgatcggcgagaaagtcagcaggccgcttagttagccgctgcctcttttgcctgcgggatgtgacaccagttgttgttttcgttaattccaccatccggactagtatagccaagacaacccatgatggtatcgtacagctctacgtgacggcgtggcactttcatgtcggcttcttttttcagctgcgcaaacgcctgcgcattggccggattttccagatatttatcactcatccagaccatcatcggtacgcggaactgctccggcggtgccagttcacgcggcgtgccgtgcaggtgctcgcgttcattaatactctcaccgtggtcagctgcgtagaacacaatcgctttcttatcgcgaacctgatcaatcacgctggagataaagtgatccacataggtcacgctgttgtcataggagttgatcatctgcgctttggtacagccgctatcaacaccaatacattccggcttccactgcgcgaagctacgcggataacgctgggtgtagttaaaatggctacctttggtatgcagaatgatcagatgcttaccatccgggttgcgccctaggctttgctgcatttcgtctaccagcaacatatcatctaccggcttgccacgattacgtggctccgcaccaatctgctcacgataagcaatgttgtccgccatcgtgttgctgtagaaccacatttcgctctgcatagcgtagaggtcagaactgaatcctaactgcttcagaaccgcgaaaatgttctgttcttttaatgtgcgctgcggattatcttccgcgcccccctgacgtacaaacatgcaacgcagactgagtttggttgcggtatcacaggagtaaccacggaacgccgccagatttttctcctgggccagtttcggcgtggtattacgctcatagccgaaaatacccatatggtcccaacgcgtggtttcaccgatgataaacacgacataagtgtcatcaacgttttgcggtgcctgataagtgaatttcttcgccggattaagcaaactattattatcggaagattcatcgacccgcgcccaggcatacagccccaacgcagaaagccagttacttggcagataagagttcgctacgacaccgccataactcggcaaatcaacgccggtcgccctctccactttcttctgctggatatccagcaaacgaatcggtgcccaaaccataatacccgccagtacgacgaccgccaggctgcgaatacgctgccctggggttcgcagttgtcggagcaaggtgtagcgacagcggttattccagataaggataagaggcaatgcactaacggcgattaaccagagaataaagttcagaccaacaacttctttactcaggtcgatatcggtggtcatgacggaagcgatgatgccataaccaatgaccacattaaggaaggtcatgtaatagctggcacctgcggaaaagagcaccaccaggcttgccagaatacgccagctgcggcggccaaacaggctaagaagacgtagtaaaaagaaggtcaccagtacggtggcggccagttcaacaacagcagaaatgcctttccagacggtaaaatcgtgcgcatagctgccgaagcggcggtaaaaaaccgcgccattcataaaaaggccaatatagattgcaagcaaaaagctcagcttctgctgtgtaatgcttttgatgtatctcatgcaaacaaaccctggacaaacaggtgataacaccctgcttagtggcttttcaggcccggcagggaaaaagtgcggaggtagtcagataagtaaaatctacacgcgcgaataagtagaccacagcaaagggaaaaagtgtggggaaagagtgtgcatgaagcacaaatttacaaaaatgcaagtttgaaaagagactttagcgttacaaaaagcagtaaaaagggccagttaattggcccaaattttacgagtcattgtttatacatttcgttgatgcgtttgatgcacacggaagctgaagcccagtagctcgcggctgagcattaaagggagccatgcgcctcacgcaacattttctgctctggctgacgaatcgtcgtagaaagcgccaaactcagaatcagcagggcgaaaatcacgtagaaggtcacatagaagccgccaaacagactggcgataatgctaccacaaatgctaccgataccgaaaccgagataaatcacaccgtagtttttcgccaggttattgaggccaaagaactcactgaccagactcggaaagacggtaatagtgccgccaaagttaaatgccacgcaggcaatcgctgcaaagaacgtcactgcattcaatggtgcaaacagcagggccgccatacccaccaggcttatcacctgaccaatggtaataacacggatacgggcgattttgtcagacagaatacccagcaccagacgaccactaaggttggcgatggaaataacagtgactgcattggctgcggaaaccacatcaaggtgtgccagactttgggcgatatctttcgctaccccaatcacgtacaggccgctcatgcaggcggtcaggaacattaccgctaacatccagtactgcggtttacgcatgctctctgccagcgtgtaatctttctccaccacaccattgctggttttcacttcctgttttggtgcgtctttcattaacgttgcgccgaaaacaatcatcaacagcgcaatcgctccccaaatcacaaaggttttttccagaccgaccgtttccagcagctgcgtgtcgataaatttgaaacccaggctacccagaccataagaaccgatagcgaacgcggagatcagacctttacgctccgggaaccacttcacacagttagagagcgtcagcagataacccgcgccatctgccagtcccaccagcacaccggcgcttaaccacagcatcatcaggttgtcagaatgcgctgtcaggaagaagcctaatcccagcaaaatgccggaagccatggtgacgcgtttaacgccaaaacgttcctgtaatttgcccgcaacagaagagctaattgccagccccagacttaacaagccgaaagagaaagcgacctggcttaccggcgcatccagcttggcggaaagcgcgccattaaacaggctccaggtataaacgctccccagcgcaaactgggtaatgatagtaccgatgagtgtcagccagcgggtacgctgataattactaggtgtcatggcagtattcctgcagtaataaaaaggaaaaatctctgccgacaaccataacgaagtgcactttatgcctggggaaaaacggcatgaaatgccatcagaacggaatgaaatgccttagttcaggaatgaatgacgcgacaattattcaccaaatttattatttggtaagttagcacccactatcgccacaactattgttatttaatggtttcaattgtgactgttacgttaaaatctggcgctaacccccatcgtatacagatagtcgctattattagtggtattttctgcctgagttagcgcggcataggcggcaatattttgattgagcaacatatcagcgcctacggtgacatccagccagttgccgttctggtttgtcgccgtcatccggctcaggccactttgcgccttccagatattctcgccaaattgctggttatagctgatttgcgcccagggtcggagatcgccaagccgggagtcaacacgccagcctaaggtactcacgctggcatgccataacggatcggtcagcgtggtagtactgtcgccaaactcgttatacatgctggtggttgtgccatcgtaatgtaatgccgcgaccgggccggttgtaacctgttcatataaaggaaaattccagcccatactcatactgctggtcacatccacaggggtttcttccgccagattgacttccagtcccagcgccctttggctactttgaatacgttggctcaaaatatcgttgtaatcaggttgatgatcactatcccaggtgtaacgctctgtggaaagtccgggttgcgtatcaacgatatattcttgttgccaggcgtaagctgtgttgagaaaaaaggcactgattaccacgctcgccagcaggcttagctgccagcgaccaccgcttttttttatgatcattaacacgactccagggaagagccgaattcggcaatattattgtcattgtatgaaggatatcgggcatagtagccctgtattaaatattgactttttcaccgatgcgtcaagaaaagcggctgaaatttttacgatcgggtacatagcgagggaaagtatggaacgttgcggctgggtgagtcaggacccgctttatattgcctaccatgataatgagtggggcgtgcctgaaactgacagtaaaaaactgttcgaaatgatctgccttgaagggcagcaggctggattaagctggatcaccgtcctcaaaaaacgcgaaaactatcgcgcctgctttcatcagttcgatccggtgaaggtcgcagcaatgcaggaagaggatgtcgaaagactggtacaggacgccgggattatccgccatcgagggaaaattcaggcaattattggtaatgcgcgggcgtacctgcaaatggaacagaacggcgaaccgtttgtcgactttgtctggagctttgtaaatcatcagccacaggtgacacaagccacaacgttgagcgaaattcccacatctacgtccgcctccgacgccctatctaaggcactgaaaaaacgtggttttaagtttgtcggcaccacaatctgttactcctttatgcaggcatgtgggctggtgaatgatcatgtggttggctgctgttgctatccgggaaataaaccatgattcgggaagcgcaacgtagtgaactccccgcgatcctcgaactgtggctggaaagtacaacctgggggcatccctttataaaagcgaattactggcgtgactgcattccgctggtgcgggatgcctatcttgccaacgcgcaaaactgggtctgggaagaagacggtaagcttctcggttttgtcagcattatggaaggccgatttctggcagcgatgtttgtcgcaccgaaggccgtcaggcgcggtattggtaaggcgctgatgcagtatgtgcagcagcgccatccccacctgatgctggaggtttatcaaaaaaatcaaccggcgataaatttttaccaggcacagggttttcacattgtcgattgcgcatggcaggatgaaacccaactacccacatggattatgagctggccggtggttcaaacgctgtaattaactgctggccggtggttcaaacgctgtaagtgtcagttccggaccgttgtatttttccagccatgccagcgccgtattacccgcacagccattccccagccggctgctggggagatctttggtcagcacgttcactgcgccgtttttacaaataccgtcagcggttaaatccagatccggccatgccccttcgtgaatgcaaatcacgccaggtttaattccctcgctaatgaccgctccggcaagaatttgcccgcgtgcgttccacaaccgaacagtatcgccatcttgtatgccgcgctcctgggcatcgtcaggatgaatggtgacaggctcacgatttgccaccgcgtacaattcgcgcagagaactgtaattcagctggctgtgcaggcggtgcgccggatgggcagaaagtacctgcaactgttctggttcggcattgccctgccattcgtccggctccagccacattggatgcccagggcaatccgggtaaccgtaatcggcaatacgctgactgaagatttcaatcttgccgctggcggtttttaacggatgcgccagcggatcgcggcaaaaatcagcgaagcgaataaaccgctcgctgtccgggttttccggcatctcaattaactggttggcttgccagaactcagcaaatggcggcaattcaacctgctggcttgccccgcgctgtcgggcaacgttataaaacgtttccagccattgcagctcactttttccttccgtaaaacgtgcataaccgcccttctcccagcgttcacttaactcggcaaaaacatcaaaatcattacgcgcttcatagcgtggcggcaccacttgcttcatcggcaccagatgctgattactgtaatcaccggtcatggtgagatcattacgctcaaaagaggtagtcgcaggcagaacgatatccgcgtgttttgccgccgccgtccagaagcattcagagatcaccaccagctccggtttttgccaggcacggatcaggcgattggtatcctgatgatgagtaaagttggcaccgcccgcccaccagataaaacgaatatccgggaaatgtcggttcataccgttgtgttgatatgcgccaccagggttttccagtgcttcaacaatgcgggcaacagggattttatccaccgcatcgcagccacccggcaagctgccctgcatggaagagagcaccgcagaacgccgcgtggggttaccaccattggcaaaatggtaagaaagaccaaaaccgccgccgggtgtgccgatttgccccaacattgctgccagcgtgacgatcatccagtgtttttgctcaccaaactgttggcgctgcattccccagcctgccatcagcatggtggtattttggtggaaaatagccgccagctcgcggattttcgctgcgccaacaccacaaatctctgctgcccattcggcggttttcgctattccgtcactctcgcccagcaaataagaggcgaagacggcataacctgtggtgcaacgcgccagaaacgcttcgtcgtgccaaccattttccaccagcgtatgggcgatccccagcatcagcgcaacatcggtgcccatgtgcggtgccacccactccattttatcgccaaagaaatcgacggtttcgcttcgcattggatcaatgcagatcagctttttcccgctgtcacgcagtgcagaaaagtaagaaagcccctgctcatcggatgcattccacgcaattttcagcgtattgagtgggttagcactccacagcaccacgacatcgctatgttccagcaccagcggccaactggtctgctgttgataaacttcactaccacccacgacatacggcatgatcgcctgtgccgcgccggtgctataatcccccagatgcccggtataaccgcctgccagcgccatatagcgttgtaataatgtgctggccttatgcagcacgccgttactacgccagccgtaggaaccagcaaaaatgcttgccggaccataagcctcacgaatgcgtttatgttgttggtgaataagatccagcgcctcatcccaactcacgcgaacaaattcatcctgcccacgaatgccttgcgggttttccggactcgcaagaaagccttttcgcaccattggaaatcgtacccgcgtattgctgtgaacctggtcgcgaaccgcgctctgcaaggagttttccattcctgtggctaacgcgccacggctgctaaacacggtttcgccgtcggtttcaaccagcatgggcccccaatgggcggcagtcagaacggaatatcgtgaggatgagttggccaaaccgaagactcctgaaaggttagatgtattgagcagttaaatattacttacaaatttccgagtattcccaggaataatcttcatgttcacgcggcataatctcccgccacggaacccgtggcaaagaataaaaaggttattaaggattaacaatgaagaaacgtgtttatcttattgccgccgtagtgagtggcgctctggcggtatctggctgcacaactaacccttacaccggcgaacgcgaagcaggtaaatctgctatcggcgcaggtctgggctctctcgtgggcgcgggtattggtgcgctctcttctagcaagaaagatcgcggtaaaggcgcgctgattggcgcagcagcaggcgcagctctgggcggcggcgttggttattacatggatgtgcaggaagcgaagctgcgcgacaaaatgcgcggcactggtgttagcgtaacccgcagcggggataacattatcctcaatatgccgaacaatgtgaccttcgacagcagcagcgcgaccctgaaaccggcgggcgctaacaccctgaccggcgtggcaatggtactgaaagagtatccgaaaacggcggttaacgtgattggttataccgacagcacgggtggtcacgacctgaacatgcgtctctcccagcaacgtgcggattccgttgccagcgcgttgatcacccagggcgtggacgccagccgcatccgtactcagggccttggcccggctaacccaatcgccagcaacagcaccgcagaaggtaaggcgcaaaaccgccgtgtagaaattaccttaagcccgctgtaatccctttcatgccaggtgatgcagaaatcacctggcattcttcagttttccttcatcatatttcaggctaaggtgatcgccttatcagtgaatggagagaagcatgaagccgtccgttatcctctacaaagccttacctgatgatttactgcaacgcctgcaagagcatttcaccgttcaccaggtggcaaacctcagcccacaaaccgtcgaacaaaatgcagcaatttttgccgaagctgaaggtttactgggtagtaacgagaatgtaaatgccgcattgctggaaaaaatgccgaaactgcgtgccacaagtacgatctccgtcggctatgacaattttgatgtcgatgcgcttaccgcccgaaaaattctgctgatgcacacgccaaccgtattaacagaaaccgtcgccgatacgctgatggcgctggtgttgtctaccgctcgtcgggttgtggaggtagcagaacgggtaaaagcaggcgaatggaccgcgagcataggcccggactggtacggcactgacgttcaccataaaacactgggcattgtcgggatgggacggatcggcatggcgctggcacaacgtgcgcactttggcttcaacatgcccatcctctataacgcgcgccgccaccataaagaagcagaagaacgcttcaacgcccgctactgcgatttggatactctgttacaagagagtgatttcgtttgcctgatcctgccgttaactgatgagacgcatcatctgtttggcgcagaacaattcgccaaaatgaaatcctccgccattttcattaatgccggatgtggcccggtggttgacgaaaatgcactgatcgcagcattgcagaaaggcgaaattcacgctgccgggctggatgtcttcgaacaagagccactgtccgtagatagcccgttgctcagtatggccaacgtcgtcgcagtaccgcatattggatctgccacccatgagacgcgttatggcatggccgcctgtgccgtggataatttgattgatgcgttacaaggaaaggttgagaagaactgtgtgaatccgcacgtcgcggactaagccgcgactgcgtagagtaaagcccgataatcgctcgggcttttactctttattgggttgcagtaactgctgtagtccaggcctgattaaacgcctgatgctgtgccggtaatggcgcaatcagtttgttatattcacttgcctgctgactagtcgggaactggatgccatttgcgacaaagctcacctgagtaccttgctgagcaatgtagtctccaaccatcaccagttgttgcgtgaaagtttgtgccgccggaatcaacggttgcaatgcatcagctggcgtcgttaccactttggtgaatgcctgatcaaagaccggtttcaaatcatcgctctgttttagcgcagagtgcgcagcatcggcctgcaacttcgcattttgcagttgttgcgccagcacacccaggctaccgttcatttcacgcagcggaccgctttgcgtaacgtaatcctgcggtacgcgaattgcgttaacgctgtctacaaccgggcgcagaccggaatccatcgcctgattcacctgctgagaataaccatacagaatcgcgtaatcagagacaaaaggaccaaactgttttttctgatcggcagtcagggttggtagacgttcaccgctacgcatcactgtattctgcaggaagtcgataaacgctttacgctgatcgccttctttatcaaaacacccactcaggctaactaccattaataacgccgcaagaggcgcaaaccagcgagagcaggactttcctgtcgccattttcttactcctttcacccaaaaaaagcgcacaacgacacacgcgtgtctgacgtgacaaggatagtccaggacaggcttgcaggataccctttctacgtaatcttcctggtaaaatcatggagaaaatgaaacaaggttaatttgttgtttcattgttaaaaaatgatagtgccgttgccttttttgtagccagagatttacgccttcgcagaaggttagattttcgaaatctttacaaaacaggagtggtaagagatatatcggcatttatcagatcgttaggtggctataagtcacgctaaatgacaggctgaatcgaatcatagccagagcatgccctgacttcaccccgctgtgtctgcttttcccgactattcttaatgagcttcgatgcaattcacgatcccgcagtgtgatttgaggagttttcaatggaatataaagatccaatgcatgagctgttgagcagcctggaacagattgtttttaaagatgaaacgcagaaaattaccctgacgcacagaacaacgtcctgtaccgaaattgagcagttacgaaaagggacaggattaaaaatcgatgatttcgcccgggttttgggcgtaagtgtcgccatggtaaaggaatgggaatccagacgcgtgaagcctagtagtgccgaactaaaattgatgcgtttgattcaagccaacccggcattaagtaagcagttgatggaataaacttttatccactttattgctgtttacggtcctgatgacaggaccgttttccaaccgattaatcataaatatgaaaaataattgttgcatcacccgccaatgcgtggcttaatgcacatcaacggtttgacgtacagaccattaaagcagtgtagtaaggcaagtcccttcaagagttatcgttgatacccctcgtagtgcacattcctttaacgcttcaaaatctgtaaagcacgccatatcgccgaaaggcacacttaattattaaaggtaatacactatgtccggtaaaatgactggtatcgtaaaatggttcaacgctgacaaaggcttcggcttcatcactcctgacgatggctctaaagatgtgttcgtacacttctctgctatccagaacgatggttacaaatctctggacgaaggtcagaaagtgtccttcaccatcgaaagcggcgctaaaggcccggcagctggtaacgtaaccagcctgtaatctctgcttaaaagcacagaatctaagatccctgccatttggcggggatttttttatttgttttcaggaaataaataatcgatcgcgtaataaaatctattattatttttgtgaagaataaatttgggtgcaatgagaatgcgcaacgccgtaagtaaggcgggaataatttcccgccgaagactcttactctttcaatttgcaggctaaaaacgccgccagctcataactctcctgtttaatatgcaattcacacagtgaatctcttatcatccaggtgaaaaataaaagcgtgaaacaaatcactattaaagaaagtaatctatatttctgcgcattcccagcctcctgtgttgatttccaacgagtataactttgatttatagtcaggtggggcttttctctgtctgcctttcggtgaatacctgagacaaacagtctcaagcacccgtggctattctagcttaataagtttgtttcttctccttgatataatcctaaaaaaatctcataaaattaatatatgagataatctttattcagcagaagattattaaaggttgctgtattatttagcgataaaaaaagcctgccagatggcaggctatttaataacggcgttattattgcaacaggctaatatccgcaacgcgcaggaacagttcgcgcagtttctccagcatggtcagacggttgatacgcaattctttgtcatcaaccatgaccatcactttatcgaagaaagcatcaaccggttcacgcagctcagccagttcgaccagcgcatcctggtaacgaccttccgtaaagtacggctccagcttgtcacgtagcaccacaacctgcatcgccagtttaatttcttccggctctttcagggtagaggcattcacgcggtcgctcagcacttcgtcagatttcgccagaatgttagatacacgtttgttcgccgccgccagtgcagcagctgcatccagggtacggaaatggcttaccgctttcatacgggcatcgaaatcagccggacgagtcggacgacgcgccagtaccgcctggatggtgtcaacggtataaccttcgtcctgataccaggcgcggaagcgaccgagcataaagtcgataacatcatcaactacgttggcattagtcagcttatcgccatacagacgcaccgcttcttcggtcagcgtttgcagatcaaggttgaggttcttctcaacgataattcgcagcacgccaagcgcggcacgacgcagcgcaaacgggtctttgtcgcctttcggatgctgaccgataccgaagatacccgccagggtatccatcttgtcagcaatcgccagcgcacaagctactgggttggacggcaggtcatcaccagcaaaacgcggctgatactgctcattcagcgccaccgcgacatcttccgcttcgccatcgtgacgcgcatagtgcatccccataacgccctgggtgtcggtgaactcgaagaccatgttggtcatcaggtcgcacttagacagcagacccgcacgggtagcgtggttaacgtcagcgccaatctgttcagcaatccagccagccagcgcctggatgcggtcagttttgtcgcgcagcgtccccaactgttgctggaacaacacggtttgcaggcgcggcaggttatcttcaagacgttttttacggtcggtgttgaagaagaactcggcatccgccagacgcggacgaacgactttctcgttaccggagataatctgctgcggatctttgctttcgatgttggcaacgaagataaagttcggcagcagtttgccgtcgttcgcatacaccgggaagtatttctggtcacctttcatggtgtaaaccagcgcttcagccggcaccgcgaggaatttctcttcgaattttgcggtcagaacgaccggccactccaccaggctagccacttcttccagcaggctttcgcttaagtcagcgttaccgccaatcttacgcgctgcttcttcggcatcggctttaatcttcgccttacgttcttcgtaatcggcgatgactttcccacgctcacgcagaatttccggatactgatcggcgttatcgatggtgaattccggctcgcccataaagcggtggccgcgaatcacgcgatcggactgaatgcccagaatggttgccggaatgactttgtcgcccagcagcagggtcacggtgtgcaccggacgcacgaagtgcacgtcgcttgcgccccaacgcatcagtttcgggatcggcagtttcgccagagaagtcgcaaccatattcggcagcagtgcttcggtgctttcgcccttcacatgggcgcgatacagcagccattcgcctttatcggtagtcagacgctcagcctggtcaacggtaataccgcaaccacgcgcccaaccttctgccgctttgctcggtttgccttcagcgtcgaacgcctgggcaatcgccgggccgcgtttttcgatttcacgatccggttgcgcttccgccaggttagctactttcagcgccagacgacgcggagcagcaaaccattgaacggtgccgtgtgcgaggccagcgttatccagctccgcagtaaagttcgcagcaaaggactcagccaggctgcgcagtgcttttggtggcagctcttcagtgccgatttccaccagaaaagttttctcagacatagccgcctcttacttatctttgttgcacatcgggaagccgagggcttcacgggaagcgtagtatgcttctgccactgctttggtcagggtgcgaatgcgcagaatgtagcgctgacgctcggtgacggagatggctttacgcgcatccagcaggttgaagctgtgggcggctttcagaatacgctcgtaggctggcagcggcagcggattttccagcgccagcagctgctgcgcttctttctcgtactgctcgaagcaggtgaacaggaagtccacatccgcgtattcgaagttgtaagtggactgctccacttcgttctgatggaacacgtcgccgtaggtggttttacccagcgggccgtcgctccagaccaggtcgtaaacgctgtctacgccctgaatgtacatggccagacgttccagaccgtaggtgatctcgccggtaaccggtttacactccagaccaccaacctgctggaagtaagtgaactgcgtcacttccatgccgttcagccacacttcccagcccagtccccaggcacccagcgtcgggttttcccagttatcttccacgaaacggatgtcgtgaatagtcgggtccatgcccagctctttcagagaaccgaggtacagctcctgaatattgtccgggcttggcttaatgaccacctggaactgatagtagtgctgtaaacggttggggttttcgccgtagcgaccatcggtcgggcgacgagaaggctgaacataagcagccgccatcggttctggccccagctcgcgcagacaggtcattgggtgagaggttcccgcgccgacttccatgtccaatggttgaacaatggtgcagccctggcgagcccagtaatcctgtaaggtcaggatcaagccctggaaggtcctggtatcaaacttttgcatattatttcgtgctggatacgtgtggatttaaaggaagggatcagtatacccgctggatggaagatatacagtacgaaacgggaaaaagcagggcttaacgcatggaaagatgcaaaaaatggccatccgcgtcaaaagaacagacaaactgctctttacggaaggtataaccgcgcatttcatagcttccctggaactgttcgaaggcggtgacgtcgattttttgctcgccggtgttataacgttttgccgcctgatccttgcataacgcttccatattcaagctacgcagaggatcaacctttacccgttgtgctttctgcacgggactcggtatagaacaacccactagcaccataagcgccattgccggaaagaaagcgttcatcatcattaaattaccgtctggtttgcaggtgagtcttattatttatatcggtatagtggctgatatcttacgaatttccttaagcctctataagctgtagtgataaaactcagattattccagtgcgccaaccaaatgatttatcggtcagactttttttaaccagatacagagacacagatgcagcccaaaatttactggattgataacctgcgagggatagcgtgtttaatggtggtgatgattcacaccactacctggtatgtgaccaatgctcatagtgttagccccgtcacatgggatatcgccaatgttctgaattctgcctctcgtgtcagcgtgccgctatttttcatgatttccggctatctcttttttggcgaacgcagcgcccagccgcgccatttcttgcgtatcggcttatgtctgattttttatagcgcaatcgcactgctctacattgcgctgtttacctccatcaatatggagttagcgctgaaaaacctgctgcaaaagccagtgttttaccacttgtggtttttcttcgcgattgcggtgatttatctggttagtccgctgattcaggtgaagaacgtcggcggaaaaatgttgctggtgctaatggcggtgattggcattatcgctaacccaaacacagtgccgcagaaaattgacggttttgaatggctgccaattaacttatatatcaatggcgatactttttactacattctgtatggcatgttgggccgcgctatagggatgatggacacacagcataaagcactgagctgggtgagcgccgcgctgtttgcgacgggggtttttattatctctcgcgggacattatatgaattgcagtggcgcggaaattttgccgatacctggtatctttactgtgggccgatggtttttatctgcgcaatcgcgctattgactctggttaaaaacacgctggatacgcgtaccattcgcggacttggcttaatctcccgccatagtttgggtatatacggattccacgccttgattatccatgcgctgcgcacccggggaattgagcttaaaaattggccaatactggatattatttggatcttttgcgcgacgttggcagcgagtttgttactttctatgctggtacaacgaatcgacagaaacagattagtgagttaagtaaaagcccggtcacattggactgaccgggcttacgtgagttattcgctgtattcttcctgggtaacctgtgtttcttttggtgggtttattccggcatcacgaatatttttctgcaccgctactgcaccaaacaagcttaagaagaaagccagtccataaaaacctttttcgctgagtaataatgtcgcattccacagacctaccatcagtaatgcaacagagataataaagacagtcaggcaggtcatataataaatggaagtggtcggtatgccttcatacttgtcccgaacggtcttttgataagacgccgcagaaaacagtcctaataccagtacggcaaaataatatcctttttcatttaactgcatctctgcattccatagccctaacagataggtaacgataccaccaacgagagctatccaactcacaatactaaaggccggactataggtacttattttgttgtccatcacagtattcctttcattcctgaatatgtaagagctttatgttgctcatgcgctgcgaaacaaacgcatttgaccaaacaagcagacaaaaaaggcgatgggatagatcaccatttcataagtattgataggtgcgtttaaaacaccgataaacaagagaccgatagtgattaacgcaactaactggcagatatgggtaaaaaaatcatccagttgcccgagtttttctgcgcgaagatatgcatagttgccaaaagttgctgtcattaacacgccaagaaaatagccttttccacttaacaatgggcaactgatccatagcccaaccagataaaccagcgccccgacaacaaataatagtttcgccacagtcttactggttttcataacgatctccatatctaccagcgatacattacgagtaaccaacgaaagacaaaactgaaaaatgccattaacaaatgattttcagaataaattcatactaaatattaattaattactgagatatatagatgtgaattatcccccacccggtcaggcaggggataacgtttacgccattaatggcagaagttgctgatagaggcgacggaacgtttctcgtcgtggctgataagcggcataacgctgcgcatctggtagatggctctgttctaacggtagttgcggcaacaattcaatgaggcttttctctggattcgccgcgatctgcgccagccttgctgcgcccagtgctggccccacatccccccccgtacggtaatcgagctgctgaccgctgatatccgccagcatctgacgccagtactcactacgcgccccgcccccaatcaacgtaacactttgcggtttaataccgcaggcatgcacgacatccatgccatctgccagcgcataacccacgccttccagcactgctcgcgccagttcattggggccatgttgatgagtcaaaccaaagaaaacccccttcgcctggggattattgtgtggcgtacgctcgccggaaagataaggcagaaaccaaactggctcggcactttcatcagcctgttgagctgcagcgattaaagctgggacattgctcaggccggttaatttcgcggcccaatccagacagctcgctgcactcagcatcacagacattaaatgccaacgttgcggtagcgcatggcaaaagctatgtacggcgctttctggcttgcttaagaacccttcgctgacagcaaaatagaccccgctcgtccccaggcttaacattgcctgattagcatcaaccattcccacaccaactgcaccagctgcattgtcgccaccgcctgcgacaactggcaccgtcgccataccccacgctttcgcaacttcaggtaacaaagcaccagtaatttcgctgccttcgtataatgcgggcatctggtcacgagataagtcgcaagcctgcagcatgacgtcactccagtcacgctttgcgacatccagccacatggtgccagctgcgtcagacatatcgctggcaaactcccccgtcatacgcagacgcaagtaatctttcggtaataatactttgtcgatttgacggaatatctccggctcatgccgctgaacccatagcaatttaggcgcagtaaatccgggcatcatcaggttgccggtaatcacccggctttgcggaactcgcgcttccagcaaagtgcactcttgcgcacagcgcccgtcgttccacaaaatggcagggcgtaacacccgttgctgagcatccagcaaggttgctccgtgcatctggccggcaatacccaatgctttaacgtcctgcagagaatgctgatcgcccagagctttcattgcgcgatcagttgcctgccaccactgttccgggtcttgttcgctccagagtggatgcgggcggctaacggtcagcttttccgtttgcgcagcaaccacctcaccctgctcgttgagcaaaataacttttacgccgctggtgccaagatctatcccgatatacatatcgatcgttccttaaaaaaatgcccggtatcgctaccgataaccgggccaacggactgcacagttagccgttatttgtcgaacagataatggtttaccagattttccagttgttcctggcgaccactctgatgcaccggagacaaatgatgttcctgagcatatttggctaaatctgccagactcatttggcctttcaggatttgctggcccaattcgctattccagccggaataacgctgcgcgatgcgtttatccagctcgccatcttcaatcatgcgcgctgcaattttcagcgccagtgccatcgtatccatcgcgccgatatgaccgtaaaacagatcatatttatcagtactttgacgacgtactttggcatcgaagttcagaccaccggtggtgaaaccgcctgctttgagaatttcatacatcaccagcgcattctcttccacactgttcgggaactggtcggtgtcccagcccagttgcgcatcgccacggttggcgtcgacagaaccgaacaggccaagcgcaatggcggtggctatttcatgatggaaagagtgacctgccagcgtcgcgtggttagcttcaatgttcagtttaatctctttttccagaccaaactgtttcaggaagccatagaccgtcgcggcatcgtaatcatattgatgtttggtcggttcttgcggtttcggttcgataagcaacgtgccctggaaaccgattttatgtttatgctcaaccaccatctgcataaagcggcccagttgttcacgctcctgacgcaagtcggtatttaacagcgtttcgtaaccttcacgaccgccccacaggacatagttttcaccgcccaatttatgggttgcttccatcgctgtaacaacttgcgttgccgcccagctgaagacttcaggatctgggttcgtcgccgcacccgcgccgtagcgagggtttgtaaagcagttggccgttccccacagcagcttcacgccgctctcttcttgcttgcctgccaggacatcaaccatttgcgcaaaattattgatgtactcttttaagctcgcgccctcaggggaaacatccacatcgtggaagcaataaaatggcacatgtaacttgtggaaaaactcaaatgcgacatctgctttacgcttcgccaacgccagtgcctcaccaggctgctgccacggacgattaaacgcccccacaccaaacatatccgccccgttccagcagaaggtgtgccagtagcaggcggcaaaacgcaagtgctcttccatacgcttacccaacaccagttcgtcgggattgtagtgacggaatgctaacgggttactggatttactgccttcataacgaacgcgatcgagctggtcaaaataggcttgcatattgaactccataatcaggtaatgccgcgggtgatggatgatgtcgtaatattgggcactccctttcagttgctcaattatgttatttcacactgctattgagataattcacaagtgtgcgctcgctcgcaaaataaaatggaatgatgaaactgggtaattcctcgaagagaaaaatgcaataagtacaattgcgcaacaaaagtaagatctcggtcataaatcaagaaataaaccaaaaatcgtaatcgaaagataaaaatctgtaattgttttcccctgtttagttgctaaaaattggttacgtttatcgcggtgattgttacttattaaaactgtcctctaactacagaaggccctacaccatgaaaataaagaacattctactcaccctttgcaccagtctcctgcttaccaacgttgctgcacacgccaaagaagtcaaaataggtatggcgattgatgatctccgtcttgaacgctggcaaaaagatcgagatatctttgtgaaaaaggcagaatctctcggcgcgaaagtatttgtacagtctgcaaatggcaatgaagaaacacaaatgagccagattgaaaacatgataaaccggggtgtcgatgttcttgtcattattccgtataacggtcaggtattaagtaacgttgtaaaagaagccaaacaagaaggcattaaagtattagcttacgaccgtatgattaacgatgcggatatcgatttttatatttctttcgataacgaaaaagtcggtgaactgcaggcaaaagccctggtcgatattgttccgcaaggtaattacttcctgatgggcggcagcccggtagataacaacgccaagctgttccgcgccggacaaatgaaagtgttaaaaccttacgttgattccggaaaaattaaagtcgttggtgaccaatgggttgatggctggttaccggaaaacgcattgaaaattatggaaaacgcgctaaccgccaataataacaaaattgatgctgtagttgccagtaacgatgccaccgcaggtggggcaattcaggcattaagcgcgcaaggtttaagtgggaaagtagcaatctccggccaggatgcggatctcgcaggtattaaacgtattgctgccggtacgcaaactatgacggtgtataaacctattacgttgttggcaaatactgccgcagaaattgccgttgagttgggcaatggtcaggaaccaaaagcagataccacactgaataatggcctgaaagatgtcccctcccgcctcctgacaccgatcgatgtgaataaaaacaacatcaaagatacggtaattaaagacggattccacaaagagagcgagctgtaagcgttacgccccagcgcggagcgggggcgtgatttctctccatgccgcgtgaatgaattggcttaggtggagtcgttatgccttatctacttgaaatgaagaacattaccaaaaccttcggcagtgtgaaggcgattgataacgtctgcttgcggttgaatgctggcgaaatcgtcagtctttgtggggaaaatgggtctggtaaaagtacgctgatgaaagtgctgtgtggtatttatccccatggctcctacgaaggcgaaattatttttgcgggagaagagattcaggcgagtcacatccgcgataccgaacgcaaaggtatcgccatcattcatcaggaattggccctggtgaaagaattgaccgtgctggaaaatatcttcctgggtaacgaaataacccacaatggcattatggattatgacctgatgacgctacgctgtcagaagctgctcgcacaggtcagtttatccattagtcctgatacccgcgttggcgatttagggcttgggcaacaacaactggttgaaattgccaaggcacttaataaacaggtgcgcttgttaattctcgatgaaccgacagccagtttaactgagcaggaaacgagcattttactggatattattcgcgatctacaacagcacggtatcgcctgtatttatattagccacaaactcaacgaagtcaaagcgatttccgatacgatttgcgttattcgcgacggacagcacattggtacgcgtgatgctgccggaatgagtgaagacgatattatcaccatgatggtcgggcgagagttaaccgcgctttaccctaatgaaccacataccaccggagatgaaatattacgtattgaacatctgacggcatggcatccggttaatcgtcatattaaacgagttaatgatgtcagcttttccctgaaacgtggcgaaatattgggtattgccggactcgttggtgccggacgtaccgagaccattcagtgcctgtttggtgtgtggcccggacaatgggaaggaaaaatttatattgatggcaaacaggtagatattcgtaactgtcagcaagccatcgcccaggggattgcgatggtccccgaagacagaaagcgcgacggcatcgttccggtaatggcggttggtaaaaatattaccctcgccgcactcaataaatttaccggtggcattagccagcttgatgacgcggcagagcaaaaatgtattctggaaagtatccagcaactcaaagttaaaacgagctcccccgaccttgctattggacgtttgagcggcggcaatcagcaaaaagcgatcctcgctcgctgtctgttacttaacccgcgcattctcattcttgatgaacccaccaggggtatcgatattggcgcgaaatacgagatctacaaattaattaaccaactcgtccagcagggtattgccgttattgtcatctcttccgaattacctgaagtgctcggccttagcgatcgtgtactggtgatgcatgaagggaaactaaaagccaacctgataaatcataacctgactcaggagcaggtgatggaagccgcattgaggagcgaacatcatgtcgaaaagcaatccgtctgaataacgcattgaggagcgaacatcatgagcaaaagcaatccgtctgaagtgaaattggccgtaccgacatccggtggcttctccgggctgaaaagtctgaatttgcaggtcttcgtgatgattgcagctatcatcgcaatcatgctgttctttacctggaccaccgatggtgcctacttaagcgcccgtaacgtctccaacctgttacgccagaccgcgattaccggcatcctcgcggtaggaatggtgttcgtcataatttctgctgaaatcgacctttccgtcggcagtatgatggggctgttaggtggcgtcgcggcgatttgtgacgtctggttaggctggcctttgccacttaccatcattgtgacgctggttctgggactgcttctcggtgcctggaacggatggtgggtcgcgtaccgtaaagtccctagttttattgtcaccctcgcgggcatgttggcatttcgcggcatactcattggcatcaccaacggcacgactgtatcccccaccagcgccgcgatgagtcaaattgggcaaagctatctccccgccagtaccggcttcatcattggcgcgcttggcttaatggcttttgttggttggcaatggcgcggaagaatgcgccgtcaggctttgggtttacagtctccggcctctaccgcagtagtcggtcgccaggctttaaccgctatcatcgtattaggcgcaatctggctgttgaatgattaccgtggcgttcccactcctgttctgctgctgacgttgctgttactcggcggaatgtttatggcaacgcggacggcatttggacgacgcatttatgccatcggcggcaatctggaagcagcacgtctctccgggattaacgttgaacgcaccaaacttgccgtgttcgcgattaacggattaatggtagccatcgccggattaatccttagttctcgacttggcgctggtagtccttctgcgggaaatatcgccgaactggacgcaattgcagcatgcgtgattggcggcaccagcctggctggcggtgtgggaagcgttgccggagcagtaatgggggcatttatcatggctagtctggataacggcatgagtatgatggatgtaccgaccttctggcagtatatcgttaaaggtgcgattctgttgctggcagtatggatggactccgcaaccaaacgccgttcttgattttgataaaaattttctcaaagccggttacgtattaccggttttgagtttttgcatgattcagcaggaaaagaaccatgtttactaaacgtcaccgcatcacattactgttcaatgccaataaagcctatgaccggcaggtagtagaaggcgtaggggaatatttacaggcgagtcaaagcgaatgggatattttcattgaagaagatttccgcgcccgcattgataaaatcaaggactggttaggagatggcgtcattgccgacttcgacgacaaacagatcgagcaagcgctggctgatgtcgacgtccccattgttggggttggcggcagctatcaccttgcagaaagttacccacccgttcattacattgccaccgataactatgcgctggttgaaagcgcatttttgcatttaaaagagaaaggcgttaaccgctttgctttttatggtcttccggaaagtagcggcaaacgttgggccactgagcgcgaatatgcatttcgtcagcttgtcgccgaagaaaagtatcgcggagtggtttatcaggggttagaaaccgcgccagagaactggcaacacgcgcaaaatcggctggcagactggctacaaacgctaccaccgcaaaccgggattattgccgttactgacgcccgagcgcggcatattctgcaagtatgtgaacatctacatattcccgtaccggaaaaattatgcgtgattggcatcgataacgaagaactgacccgctatctgagccgtgtcgccctttctagcgtcgctcagggcgcgcggcaaatgggctatcaggcggcaaaactgttgcatcgattattagataaagaagaaatgccgctacagcgaattttggtcccaccagttcgcgtcattgaacggcgcagtacagattatcgcagcctgaccgatcccgccgttattcaggccatgcattacattcgtaatcacgcctgtaaagggattaaagtggatcaggtactggatgcggtcgggatcagccgctccaatcttgagaagcgttttaaagaagaggtgggtgaaaccatccatgccatgattcatgccgagaagctggagaaagcgcgcagtctgctgattagtaccaccttgagcatcaatgagataagccaaatgtgcggttatccaagcctgcaatatttctactctgtttttaaaaaagcatatgacacgacgccaaaagagtatcgcgatgtaaatagcgaggtcatgttgtaacgatgatgagaattgtcggcgtcacatcaggtaacgctgcgtggttgtcggatgcggcgtgaacgccttatccgacctacccgccaggcatgataaaacgcaccaacaacgcttcaggctcgtagctcaactgcctgagacaaagtaaaaagccttatccgactgacaagtcggataaggctcaaggaaatgcaattacatatgcgccgcgattaaccgttggttatcctggtacattgcgaacaggtagttgttataactcttccctttggtgctgtagcccttcagcttgtgaatcatcgctgtggcagtcacttcctgatccgctttacgcagctgcgcacggcttttacggaagctagagtaagccgggtgcgtattcaggttagtgacataggcgctcacgctttctttgacagaactaaactgactgtaccctttcactttacctggcgcattggtacaacgtcctttcatgcatttcatgccgaacaggttgttgttgttgcgcgccagcttgctcgttccccaaccgctttctgctgcagccatcgtcgccaccatactggtggggataatgtctacgcgttcaagcaaggtattccacgggatttttcgcgtattaccggaccacttcaccttgtagcgtttggcgatgtctttcagacgcgcacgctcagcaggactccattggccctgatactgtttactaatgagccagttacgttccgcagtaatggccgcattttggctggtaatgtaaggcattacggtccggagaaacgcctttttccttggtgttccggaagggtattttcgcaaatcaggaagactactactctttgcactattgcgagaatactcttgtttactgcttacctgtttattactagctttagttaagtgggacttttgactcgctgttgttgtgtgcgtcttcgctaacacctcactgctaaacaccagagtgagtaacataagaatcatcgccccatatcgtcgtatgggagtcaaaatcatcaggtctcctggtcggatttaatcattccaacaccttatatttttcacaaatttgagagttgaatctcaaatcatatcaaaaatagctgtcaagagcaccccaaggaatagtccaaatctgaaactatgtcacgtgttaacgattcagattggcgctaaatcgcagaaaatgtgggggttatcgcaaaattcagccgttttttgcgcgagatcgctcacccttgcttctcatcctgtggacttaccgctcagggatgagttttgtttggcttatcgctggcaaactgtctgaaatcgcagcaataaggactcatccgccatgaaactcgccgcctgttttctgacactccttcctggcttcgccgttgccgccagctggacttctccggggtttcccgcctttagcgaacaggggacaggaacatttgtcagccacgcgcagttgcccaaaggtacgcgtccactaacgctaaattttgaccaacagtgctggcagcctgcggatgcgataaaactcaatcagatgctttccctgcaaccttgtagcaacacgccgcctcaatggcgattgttcagggacggcgaatatacgctgcaaatagacacccgctccggtacgccaacattgatgatttccatccagaacgccgccgaaccggtagcaagcctggtccgtgaatgcccgaaatgggatggattaccgctcacagtggatgtcagcgccactttcccggaaggagccgccgtacgggattattacagccagcaaattgcgatagtgaagaacggtcaaataatgttacaacccgctgccaccagcaacggtttactcctgctggaacgggcagaaactgacacatccgcccctttcgactggcataacgccacggtttactttgtgctgacagatcgtttcgaaaacggcgatcccagtaatgaccagagttacggacgtcataaagacggtatggcggaaattggcacttttcacggcggcgatttacgcggcctgaccaacaaactggattacctccagcagttgggcgttaatgctttatggataagcgccccatttgagcaaattcacggctgggtcggcggcggtacaaaaggcgatttcccgcattatgcctaccacggttattacacacaggactggacgaatcttgatgccaatatgggcaacgaagccgatctacggacgctggttgatagcgcacatcagcgcggtattcgtattctctttgatgtcgtgatgaaccacaccggctatgccacgctggcggatatgcaggagtatcagtttggcgcgttatatctttctggtgacgaagtgaaaaaaagcctgggtgaacgctggagcgactggaaacctgccgccgggcaaacctggcatagctttaacgattacattaatttcagcgacaaaacaggctgggataaatggtggggaaaaaactggatcagaacggatatcggcgattacgacaatcctggattcgacgatctcactatgagcctagcctttttgccggatatcaaaaccgaaagtactaccgcttctggtctgccggtgttctataaaaacaaaatggatacccacgccaaagccattgacggctatacgccgcgcgattacttaacccactggttaagtcagtgggtccgcgactatgggattgatggttttcgggtcgataccgccaaacatgttgagttgcccgcctggcagcaactgaaaaccgaagccagcgccgcgcttcgcgaatggaaaaaagctaaccccgacaaagcattagatgacaaacctttctggatgaccggtgaagcctggggccacggcgtgatgcaaagtgactactatcgccacggcttcgatgcgatgatcaatttcgattatcaggagcaggcggcgaaagcagtcgactgtctggcgcagatggatacgacctggcagcaaatggcggagaaattgcagggtttcaacgtgttgagctacctcagcagccatgatacccgcctgttccgtgaagggggcgacaaagcagcagagttattactattagcgccaggcgcggtacaaatcttttatggtgatgaatccagccgtccgttcggtcctacaggttctgatccgctgcaaggtacacgtagcgatatgaactggcaggatgttagcggtaaatctgccgccagcgtcgcgcactggcagaaaatcagccagttccgcgcccgccatcccgcaattggcgcgggcaaacaaacgacacttttgctgaagcagggctacggctttgttcgtgagcatggcgacgataaagtgctggtcgtctgggcagggcaacagtaacttttccggcttcccgttcgtcagtacctcgggaagccgccaaccaggataaaatgtcagccctaatcagcgttgcaggataaagcaccgctcactcttcaacagaccgatttgcaccccagcaaatgtagcgttattgttaccttccttgctacagagttcgacagatatcccgctatgacattctccctttttggtgacaaatttacccgccactccggcattacgctgttgatggaagatctgaacgacggtttacgcacgcctggcgcgattatgctcggcggcggtaatccggcgcagatcccggaaatgcaggactacttccagacgctactgaccgacatgctggaaagtggcaaagcgactgatgcactgtgtaactacgacggtccacaggggaaaacggagctactcacactgcttgccggaatgctgcgcgagaagttgggttgggatatcgaaccacagaatattgcactaacaaacggcagccagagcgcgtttttctacttatttaacctgtttgccggacgccgtgccgatggtcgggtcaaaaaagtgctgttcccgcttgcaccggaatacattggctatgctgacgccggactggaagaagatctgtttgtctctgcgcgtccgaatattgaactgctgccggaaggccagtttaaataccacgtcgattttgagcatctgcatattggcgaagaaaccgggatgatttgcgtctcccggccgacgaatccaacaggcaatgtgattactgacgaagagttgctgaagcttgacgcgctggcgaatcaacacggcattccgctggtgattgataacgcttatggcgtcccgttcccgggtatcatcttcagtgaagcgcgcccgctatggaatccgaatatcgtgctgtgcatgagtctttccaagctgggtctacctggctcccgctgcggcattatcatcgccaatgaaaaaatcatcaccgccatcaccaatatgaacggcattatcagcctggcacctggcggtattggtccggcgatgatgtgtgaaatgattaagcgtaacgatctgctgcgcctgtctgaaacagtcatcaaaccgttttactaccagcgtgttcaggaaactatcgccatcattcgccgctatttaccggaaaatcgctgcctgattcataaaccggaaggagccattttcctctggctatggtttaaggatttgcccattacgaccaagcagctctatcagcgcctgaaagcacgcggcgtgctgatggtgccggggcacaacttcttcccagggctggataaaccgtggccgcatacgcatcaatgtatgcgcatgaactacgtaccagagccggagaaaattgaggcgggggtgaagattctggcggaagagatagaaagagcctgggctgaaagtcactaaaaattgcctgatgcgctacgcttatcaggcctacatgatttctgcaatatattgaatttggaagaatttgtaggccggataaggcgtttacgccgcatctggcataaacaaagcgcactgttccggcgttgagaaacgccggaaaacgtttcaaacaggctgctgccgtagccgatgccgctgcactttctcgacatccatgcactgcaacgcctttgtcgggcaggcttcaacacaggccggtcccgtctcccgatgccagcacagatcgcacttaatcgccctcgcctttttgcggctagaaacgacctccatcgcaccaaacgggcaagccagcatacagcttttacagccaatgcaacgtgtttgttcaacgaaaatatgcccatgttcgcggcttatcgcgtcaacagggcagacattcgcgcacggtgcatcttcacactgatgacaggctactgccgtggtccagcagtggtctttaatgacacgaatacgggaaataaactcgtctggactcaacgcagcgcaatcctgattctcatgatggctcactgcgcaagccacttcacaggtacggcaaccgatacatttcgtcgcatccgcaataataaaccggttcatgatcactcctttgcactaaaacagcagagtgccagagagcgcgtccctactgctttgatccaacgaaggaaatgttaaagttttggcacttgtccaaagcgttatgtgatcgcgcccaggtcatccctgacagtaaatcccagttcattagaaatagcctgcgcggtttcacgcagtggtttcaggagatttttctctcccacctgtttcagacgacttgtgctaaggctaatgctcacggcgtacggcacccgcccatgaatatcaaacaccggaacagcaatacaggagacgccgagttcgttttcttctctgtccatcgccgctccgctttcacgaatgtgcgccagttcgtcgaacatcgcgggcagctcggtaatggtattgcgggttaacggctggatctcatgctgatggctttcccagtaactcttcacgtagtccgggtgaccaaacgccatgtagatcttgcccattgcggaacagtagagcggcatatgctggccaatataggcacgggttcgcagcatcccggttgtgggttccagcttataaatcaaaatagcgtgatcgtcttcgcggctggagaagttaatggtttcaccagtggcgatgttcagtgcctcaagatgcggagcggcgatatgaatgatattcaggctagacagcgccttctgcccgacggcaataaatttggtggtcaggcgataactccctgcggcaggcgcggtggtcacatagccgcaggactgtaatccctgcaataagcgatggacggtactcttatttaaaccagccagctcgctaagatgcgccaacggacaaccgtttggatagttgctcaaaatctcaatcagcatcaacccgcgaaacagactctggcttccggctggacgctctttttcctgcgccatctcgttctctttttttcccatcacttctttccccattttgtcgcgtcctgatggtagcgcaaagtgtgccgtagttcacgatctcgacagataatttataaccaattgatttttatgtcttttgaaattcatcaatcagattgccttgttaaaaagtgatcgatatatttgaaatcaagtttcgcatattgaaattttaagccaaaaaagcgatcaaaaaaacaaggaagcctgggatgaaagtgacatttgagcagttaaaagcagcctttaatcgggtcttaattagtcgcggcgttgacagcgaaacggctgacgcctgtgcagagatgttcgcccgcaccaccgaatccggcgtttattctcacggcgttaatcgtttccctcgtttcattcaacaactggaaaacggcgatatcattcctgatgcccaacccaaacgtataaccagcctcggcgcaattgaacagtgggacgcccagcgtagcatcggtaacctgacagcgaaaaagatgatggatcgcgccattgaactggctgccgatcacggtattggtctggtggcactacgtaatgccaaccactggatgcgcggcggcagctacggctggcaggcggcggaaaaaggctatattggcatttgctggaccaactccatcgccgtaatgccgccgtggggcgcaaaagagtgtcgcataggcactaacccgctgatcgtcgccattccttccacgccgatcaccatggtcgatatgagcatgagcatgttctcttacggcatgttagaagttaaccgtctggcaggtcgtcagctcccggtcgatggtggctttgatgatgagggcaatttgaccaaagaacctggcgttatcgagaagaatcgccgcattttgccgatgggctactggaaaggttctggcatgagcattgtgctggatatgatcgctactctcctttccgacggcgcatccgttgccgaagtcacccaggacaacagcgacgaatacggcattagtcaaatttttattgccattgaagtggacaagcttatcgacggtcccacccgcgatgccaagctgcaacgcatcatggattacgttactagtgccgagcgtgctgacgaaaatcaggccattcgcttacccggccatgaatttactaccctgctggccgaaaaccgccgtaacggcatcactgttgatgacagcgtgtgggccaaaatccaggcgttatgaggagataagtcatgatttttggacatatcgcgcagcccaatccgtgccgtttgcccgccgccattgaaaaggcgctcgattttctgcgcgctaccgatttcaacgccctggagccgggcgttgtcgaaatcgacggcaaaaatatttatacgcaaattatcgatttaaccacacgcgaagcggtggtaaaccgtccggaagtgcatcgtcggtatatcgatattcagtttctggcgtggggcgaagagaaaatcggcattgctattgatacgggaaataataaagtcagcgaaagtctattagagcagcgcaatattattttttatcacgacagtgaacatgaaagttttatagaaatgataccgggcagctacgcaattttctttccgcaggatgttcaccgaccaggttgtattatgcaaacagcctctgagatacgaaaaattgtggttaaagtcgcattaacggcgctgaattaatcgaataatcgtctacgccagaacgcctgggtaatgttattgctctaactatattaataattcaggttgctgcacatgcgacttgaattatgacagacatagcctcaaggaatagctatgaaaaaaatactcgaagcaatactggcgattaatctcgccgtactttcctgtattgtatttataaacattattttaagatatggttttcagacaagcattttatctgttgatgaattgagtcgttatttatttgtctggttaacgtttattggcgcgattgtagcttttatggataacgcccacgttcaggtcacctttctggtggagaaactctcccccgcatggcagcgacgagtcgctctggttacccattccttaatcttatttatttgtggcgcactggcctggggcgcaacgctaaaaacaattcaggactggagcgattatagtccgatcctcggtttacccatcggcctgatgtatgccgcttgtctgcccaccagcctcgttatcgcattctttgaactgcgtcatttatatcaactcatcacgcgtagcaattctctaacgagcccaccgcaaggagcttaatcatggctgtgctgatttttctgggctgtctgttgggtggtattgctatcggtttgcctattgcctgggcactgttgttgtgcggggcggcgttaatgttctggctggacatgtttgatgtccagatcatggcacaaacgctggtgaacggagccgatagcttctccctgctggcgattccgttctttgtgctggcgggtgaaatcatgaatgcgggcggcttgagtaaacgcattgttgacctgccgatgaaactggtggggcataaaccaggcgggctgggctacgtcggcgtgctggcagctatgattatggcgagcctttctggttctgccgttgcggataccgccgccgttgccgctctactggtgccgatgatgcgcagcgccaactatccggtcaaccgggcggcggggctgattgcctctggcggcattatcgcgccaattattcccccttccattccgtttattatcttcggcgtttccagcggattatccatcagtaagctgtttatggcgggcattgcccctggcatgatgatgggcgcaacgctgatgcttacctggtggtggcaggccagtcgccttaatttaccccgccagcaaaaagcaacgatgcaggaaatctggcactcttttgtctccggtatctgggcgctgtttcttccagtcatcattattggcgggtttcgctccggcctgtttacccctaccgaagccggggccgttgctgctttctatgcgctgtttgtcgccacagttatttaccgtgaaatgaccttcgccacactttggcatgtactcattggcgcggcgaaaaccaccagtgtggttatgtttctggtggccagcgcacaagtttccgcctggctgattaccattgctgaactgccgatgatggtttctgatttactgcaaccgttggtcgatagtccgcgtctgctgtttatcgtcattatggtggctatcctgattgtcggcatggtcatggatttaacgccgacggtattaattcttaccccggtattaatgcctttagttaaagaggcaggaatcgatccgatttatttcggtgtcatgtttatcattaactgcagtatcggcttaattacaccgcctatcggtaatgtacttaacgttattagtggggtggcaaaactcaaattcgatgatgcagtcagaggcgttttcccttacgtcctggttttatatagtttattagtcgtatttgtttttattcccgatctcatcatcctccctttgaaatggattaattaaaaggaaaatattatgaaattacgctctgtaacctacgcattattcattgctggcctggctgcattcagcacatcttctctggcggcacaatctttacgtttcggttatgaaacaagtcaaaccgacagccaacatattgcggcgaaaaaattcaatgatttattgcaggagagaaccaaaggcgagctgaaattaaaactgttcccggacagcactctcggtaacgcgcaggcgatgatcagcggcgtacgtggcggcaccatcgatatggaaatgtccggcagcaataactttgccgggttaagtccagtgatgaacttgcttgatgtccctttcctgttccgcgataccgctcacgcgcataaaacgctcgacggcaaagtcggtgatgatctgaaagccagtcttgaaggtaaaggactgaaagtactggcctactgggaaaacggctggcgcgatgtcaccaacagccgcgcaccggttaaaacccccgccgacctgaaagggctgaaaatccgcaccaacaatagcccgatgaatatcgccgcattcaaagtctttggcgctaacccgatcccgatgccgtttgccgaagtctataccgggctggaaacccgcactatcgacgctcaggaacacccgatcaacgtcgtctggagtgcaaaatttttcgaagtgcagaagttcctttctctgacgcaccacgcctattccccgcttctggtggtgatcaacaaagcgaagtttgatggcttaagtccggagttccagcaggcgctagttagttctgcacaagaagcgggtaactatcagcgcaaactggttgctgaagatcagcaaaaaatcatcgacggcatgaaagaagcgggcgtggaagtcatcaccgatctcgaccgcaaagcctttagcgacgcactggggaatcaggttcgcgacatgtttgttaaagatgtgccgcagggagctgatctgctgaaagccgtggatgaggtgcaataaaccatgacgcaatactggctggggttagattgtggcggtagctggctgaaagccgggctgtatgaccgcgaaggccgggaggcaggcgtgcagcgcctgccgctgtgcgcattaagcccgcagccaggctgggcagagcgcgatatggcagaactgtggcaatgctgcatggctgtcattcgcgccctgcttactcattctggtgttagcggggaacaaattgtcggtatcggcatctccgcacagggaaagggcttgtttttgctggataaaaacgacaaaccgctcgggaatgctattttgtccagcgaccgccgggcgatggaaatcgttcgtcgctggcaggaagatggcatcccggaaaaactctacccgctgacccgacaaaccttgtggaccgggcatccggtgagcctgttacgctggctgaaagagcacgaaccagaacgctacgcgcaaattggctgcgtgatgatgacgcacgactacctgcgctggtgtttaactggcgtcaaaggctgtgaagagagcaatatttccgagtccaacctctacaacatgagtcttggggaatatgacccgtgcctcaccgactggctggggatcgctgaaatcaatcacgccctgccgcctgttgtcggatctgccgaaatctgcggggagatcaccgctcagacagccgccctgaccggtctgaaagcgggtacgcccgttgttggcggcctgtttgatgtggtttccaccgcactctgcgccgggatcgaagacgaatttaccctcaatgcggtgatggggacctgggcggtgaccagcggcataacccgcggtttacgtgacggtgaagcgcatccgtatgtctatggtcgctacgttaacgatggtgaatttatcgttcacgaagccagccctacctcttccggcaacctcgaatggtttaccgcacagtggggagaaatcagctttgatgagatcaatcaggccgttgccagcttgccgaaggctgggggcgatctctttttcctgccgttcctgtacggcagcaacgccggactcgagatgaccagtggtttctacgggatgcaggccattcacacccgcgcgcacctgttgcaggccatctatgaaggggtggtgttcagccatatgacccacctcaaccgaatgcgcgaacgttttactgatgttcacaccctacgcgtcactggcggcccggcgcactccgatgtctggatgcaaatgctggcggacgtcagcggtctgcgtatcgagctgccgcaggtggaagaaaccggctgctttggtgcggcccttgccgcccgcgtcggcaccggggtttatcacaacttcagcgaagcccaacgtgacttgcgacacccggtgcgcaccctgctgccagatatgaccgcccatcagctttaccaaaaaaaatatcaacgttatcagcatctcattgccgcacttcagggctttcacgcccgcattaaggagcacacattatgagccgaccacttctgcaactggccctcgaccacagtagtcttgaagccgcgcagcgcgacgtgacgctgttaaaagacagcgtcgatatcgtcgaagcgggcaccattctctgtttaaacgaagggcttggcgcggtgaaagccttgcgcgaacagtgcccggacaaaatcatcgttgctgactggaaggtcgccgacgctggtgaaacgctcgcgcaacaggcgtttggcgcaggcgctaactggatgaccatcatctgcgccgcgccgctcgcgacggtagaaaaaggccacgcaatggcacaacgctgcgggggtgaaattcagatagagctgttcggtaactggacgctggacgacgcccgcgactggcatcgtattggcgtgcggcaggccatttatcatcgcggtcgtgatgcacaggccagcgggcaacagtggggcgaagccgatctggcacgcatgaaggcgcttagtgatatcggccttgagctttccattactggcgggattacccctgctgacctgccgctgtttaaagatatccgcgtgaaagcgtttattgccgggcgggcactggcaggcgcggcaaatccggcgcaagtggctggcgatttccatgcgcaaatcgacgctatctggggaggtgcgcgtgcgtaatcatcagttagggatttatgaaaaagcgctggcgaaagatctctcctggccggagcggctggtgctggcaaaaagctgcggttttgattttgtcgaaatgagcgtggatgaaaccgacgaacggctcagtcgtcttgactggagcgccgcacaaaggactagcctggttgccgcgatgatcgaaacaggtgttgggatcccgagcatgtgcctgtccgcacatcgtcgctttccctttggtagccgtgacgaggcagtgcgcgaacgggcgcgggaaatcatgagtaaagcgattcgcctggcgcgcgatctcggcattcgcaccatccagctggcaggttatgacgtctattacgaagaccacgacgaaggcacccggcaacgttttgctgaagggctggcgtgggcagtcgaacaggcggcggcaagtcaagtaatgctggcggtggagattatggataccgcgtttatgaactccatcagcaaatggaaaaaatgggacgagatgctcgccagtccgtggttcaccgtctacccggacgtcggcaacctcagcgcctggggcaatgatgttcccgccgaactgaaactgggcattgaccgtatcgccgcgatccacctgaaagacacccagccagtcaccgggcaaagtcccggacagttccgcgacgtgccgtttggcgaaggctgcgtcgatttcgttggcatcttcaaaacgctgcataaactgaactatcgcggttctttcctgattgagatgtggaccgaaaaagccaaagagccggtgctggagattattcaggcgcggcgttggattgaagcgcgtatgcaggaggctggatttatatgttaacgtaaatgcaggaggctggatttatatgttagagcaactgaaagccgacgtgctggcggcgaatctggcgcttcccgctcaccatctggtgacgttcacctggggcaatgtcagcgcggtagacgaaacgcggcaatggatggtaatcaaaccttccggcgtcgagtacgacgtgatgaccgccgacgatatggtggtggttgagatagccagcggtaaggtggtggaaggcagcaaaaaaccctcttccgatacaccaacgcatctggcgctctaccgtcgctatgccgaaattggcggtattgtgcatacccacagccgccacgccaccatctggagtcaggccgggctggatctccccgcctggggcaccacccacgccgattatttttacggtgccatcccctgcacgcgacagatgaccgcagaggagattaacggcgaatatgaatatcagaccggcgaagtgatcattgaaaccttcgaagaacgtggcaggagtccggcacaaatcccggcggtgctggtgcattctcacggcccgttcgcatggggtaaaaacgccgccgatgccgtgcataacgccgtagtactcgaagaatgcgcctatatgggtctattcagccgccagcttgcgccgcagctccctgcgatgcaaaacgaactgctggataagcactacctgcgtaagcatggggccaatgcctattacgggcagtaatccctcacgccggggcttcatcgccccggcactacgaattgatatgttccttgctgtaacgccgcttccacgctgctggcgttaaaccagtatgtttctgaaaaatctgccggaaatagccaacgtcattaaaccgtattgcatggagcaggccgacaacgtcgagtcactgcataacctgttgctgcccgccgatgcgccatttacgacatttgaaggcaagggattgttcagccataagatcctgattcagacgccaggttcccggtatgaacagagcaatccagagcaacaacctttgtggcattacgacggagcaccagccgcaccgacatccaccggtgaattaaaaacgccagctcaccccggtgacaaaggtaaaactctcattacgatcaatcatcgggctgtcggtaatctcttccggcagctcgctgtatcctgcgctcgccatcaatacgacgtgctctcctatcgggtattttgccgtcaggctgacatagggcacccaggcatcctgcgcggaataacttgccagaccgctacgacgggactcactctcactaatgccatagtaatagtcactgaaattctcgtcataatagagaacgcccagcgcaggtgtcaggctcagacgacctatctgcattttgtggaatacgcttagctcccccacccagccgttgctgttatccagaacgtccgcagctgcagaggctttcacggttccccaacgctcgtggtgataccaggcaacccccgccatagccgtactatcacgcttatcaagctgttgcatggcataatcgtcattatcggtagggtcaaattccagcggcatccaggatgcggtcaggctaagttcatttttttcactttggctcagaataaaacctaacgtggtctgacgaacataaaaagtatcaccttcataactaatcagcggaattgccttcgtattttcattataaccgcgataagggctttcattataagccgcaccagcaccaatggataattcagaagcagttgcgcttgccataaaaggcaacgcaaataacgccacaatattgcgattaattaacatgtccggtattccattttaaaataagataaaaaagagtcggcataataatgcttacaatttctccggtgcaagattcatatttatatagtaatatataaaattatatataattgggctgttgcgatgacaaaattacaacttaagtaccgggagttaaaaattatcagcgtaatcgctgccagtgaaaatatcagccatgccgcgactgtacttggcatcgcacaggccaacgtcagcaaatatcttgctgattttgaaagtaaagtgggtttaaaagtctttgaccgaaccacccggcagctgatgctcacaccttttggcaccgcgctgttaccgtacatcaacgacatgctggacagaaacgagcaacttaataattttattgcagattataagcatgagaaacgtggtcgggtcaccatctacgccccaaccggcataattacctatttatccaaacatgtaatcgataaaattaaagatatcggtgatatcaccttaagcctaaaaacctgcaatcttgagcgtaatgccttttatgaaggcgtcgaatttcctgatgattgtgatgttttaatcagctacgctccaccaaaagatgaaagcctggttgccagttttattacccaatatgccgtaaccgcttatgccagccagcgctatcttgagaaacatcccattagccgtcctgacgaactcgaacatcactcctgtattttgatcgacagcatgatgatcgacgacgcgaatatctggcgcttcaacgtcgccgggagtaaagaggtgcgggattatcgcgtgaagggaaattacgtttgcgacaacacgcaatctgcgctggagctggcacgaaatcacctggggattgtgtttgcgccagacaaaagtgtgcagagcgacctgcaagacggcacgctggtgccctgctttcagcaaccctatgaatggtggctggatctggtggctatcttccgtaaacgggaataccagccctggcgggtccagtatgtgctggatgaaatgctgcgtgaaattcgccaccagcttgctcagagccagcaactgcggcctgaacaagcggcggaaagcgaagattaatgatcgagataaaggtaatgcacccagctggtcatgcgtaatagcactttgcgcatcacgctgacatggctgaaatgatcagagtaaaccgccacctgggcgtaaataccgtctggtaaagcgctcaaatcagtgtgctcatccagttcaatggtcgcgataacgccatcactacccggcgctgtgtttaacgtctgtaaggtgccggtgctctgataagctccgccgggaacggctggactaatggctgccagcttaccgctgaataccttacctggcagagcattaaacaccacttccgcatcgtcgccaggagccagtcgcagcaaggagttctgacggaactgcgccacgatttgtcgtttctgatcgggtataaacaccatcaccggacgtagcggcaggctcgcggcataggtacccggacgaatcagtacctgggtcacataaccatcgctcggcgcacgcactatcgtctgctcaaggttatattttgcttccgcgagctgtgctttcaggctggcgatttgagaatgttcacccaacaccaggctatccagctggctctggatctgtttttgttccgccgcgctactcttcacggaggcttcctgcgccagataattttgccgcgccacatcgatatcgcgttcactaaacgggtttactttcgcctggctgccacgtgcgtaacgctgatactctttagcgaatttatcccgcgtggcctttgcctgctgagtattcgccgccatctcatctaactctgcgcccaacgcccgctgtttatgttctgcggtaacgatatccgccatcagccgatccacccgcgcctgataacgcgtcgggtccagtcgaaatagcacctcaccttttttaatcagcgtatttttcttatccgtcacttcaatcaccacaccagtcacctgtgggacaacaggaatagaaataaccgctttttgcgctttaaaggtatacggatggttatagttcattaacagaattagaccgctgacaataaatattccacccagggccgctgtgggaatggtccatttatttacgggaattttgaagatcttaaacattgcccatgcaaaagccacataggtcaaaataatcagtaaatccataagtattactcggcagaagaggatttgatgtcggcgagctgtttctccagcccggcaatgcgctgttgcagttgcataacggaactatcatggctttgcattccccatccccgctccgggcggtaaagcgtggcccaaatccacaaaaacggccagataacatgtaacgtaaaaagactcacccaaccagcaacatgaatggcgtcggcatgaggatgattacgttttttggcaatcaggtagggaatatcatgtaaaataatgatcccatagaagatcaccagaaatacaaaaataagcactcccagtgcaaaatagtccaggaacatatttccctcaaagaatataaaaaagaacaattaacgcatattatgaaatgccatgatgcagtgcaatttccttatttatataacgacatattgttttttatatactttcttaaatgtgctgtctggtttttcaacaggacgaggtttatcatattgaaatagtggaactattggccaaactaatgaataactccagtaaaacatccacagtacagattaagcgtattaaaccttcaattatctaccgtttattgctgattggcctcggatcaccaatggtgatttacggcctggttcgcccgctcaccatcgaaacgcgagattaaactcctgacaaaacacgccccagaaacgtacttctgttggcgtagtctgggttattgcgcacgtaggtttaaaacgtaaattgtaacaacgtgcgctttgtttatgccggatgcggcgtgtacgccttatccggcctacggtcaggttcccgtaggcatgataagacgcgtaagcgtcgcatcaggcaatgaatacccaatgcgaccagcttcttatatcagaacagccccaacggtttatcgctgtagctcaccagcaggcacttggtttgctggtaatgctccagcatcatcttgtgggtttcgcgaccgataccactttgtttgtagccaccaaacgccgcatgtgccgggtaagcgtgataacagttggtccacacgcgcccagcctgtatgccgcgccccatcttataggccagattaccgttgcggctccagacgcccgcgcccaggccatattgcgtatcgttcgccagctccagcgcttcttccatcgttttgaaggtggtcaccgccagcaccgggccaaaaatctcctcctggaacacccgcatattgttctgaccaaacagaatcgtcggttcgaggtagtagccgtctttcagttcaccttccagcagcttgcgccgcccgcctgtgagcacgtcagcgccctcttttttaccgatatcaatgtagttgaggatggtttccagttgcccgtgagaaacctgcgcgcccatttgcgtcacgctgtcgagcgggttaccgctacgaatgctttcgacacggcggatggcgcgttccataaagcgttcgtagatagattcctgcactaaagcacgactcggacaggtgcaaacttcgccctggttaaaggcaaacagtgcaaagccttccagcgctttatcgaaaaaggcatcttcttcatccatcacatcagcaaagaagatatttgggctcttaccgcccaactccagcgtcaccggaataatgttttgcgttgcgtattgcataatttgttggcccacttccgtactgccggtaaacgccactttggcgatgcgtttgctggtcgccagatattcgccaattaccccacctgcgccattgaccacgttcaccacgcccggcggcagtaaatcaccgacaatttccattagcagcagtacagaaagcggggtaagacgtgcgggtttcagcaccacacagttgcccgccgccagcgcgggagccattttccagctcgccatcagcagcgggaagttccacgggataatctgccccaccacgcctaacggttcatggaaatgataggccacggtttcgctatcaacttcactgatcccaccttcctgcgcccgaatacagctggcgaaatagcggaaatggtcaatcgccagcggtacatccgcagcactggtttcgcgaatgggtttgccgttatcccaggtttcagctgtcgctaacagctcgaggttttgttccattcgatcggcaatcttaaacagaatcgccgcacgatcctgcacgctggtgtgcgcccatttatctttcactttgtgcgcagcatccagcgccagatcgatgtctcgtttgccgctagacgccacttcgcacagcagctgcccggtcaccggcgtcagattctggtaatactcgccgtcggcaggggctacccattcgccgccaataaagttgtcatagcgggcttttaacttgagggggaaaccatactcgccgggcttaatctgtgcactagggggattattggtcatgatcgtctccttgcggtgtgaggtataacaagggtagacgtgactggcgaaatcttcgccagtcggtaacagctttacgacagctatcacgaatttacgggcaagggttacagagatagttgaaaaagcggctaacaatttgccagccgttgtggaaatgatgattacatcgctgcgcgataaatcgccacaatttcttcgtgagttgcctggatcgggttagtaaagccacaggcatctttcagggcattagtcgccaataccgcgaaatcttcttctttcacgttcaggtcgcgtaggcctgccgggatatccactttcttcgccagttcacggatggcgttaatgcaggcttcagcaccttccgcgtcgtttttacctgtcacgttcacgcccattgcagcggcacagtcacgcagacgtgcagcggcgactttgctgttgaatacctgaacgtgcggcagcaaaacggcgttacatacaccgtgtggcaggttgtagaaaccgcccagctggtgcgccatcgcatgaacataacccagagaagcattattgaacgccataccggcgaggaactgggcataagccattgcttcacgcgctttcgcattactgccatcttcaacggctaacggcaggttttcggcaatcatggtcacggctttcagtgcacaagcgtcagtgatcggcgtggcggcaatagaaacatatgcttcgatagcgtgcgttaaggcatccatacccgttgcggcggtcagactcttcggcataccaatcatcagagaggagtcattgacagaaagcagcggagtgacatgtttatcaacaatcgccattttgatatgacgcgcttcgtcagtgatgatgcagaaacgggtcatttcagaggccgtacccgccgtggtattgatggcgatcatcggcagctgcggttttgcagagcggtcaacgccttcgtaatcgcgaatatcgccgccattggctgccaccagcgcaataccttttgcgcagtcgtgtggagaaccaccgcctaaggagatcacgctatcgcaattattctctttaagtaatttcaaacctgcggcgacgttttccgtggtggggttaggttgggtgccatcataaataacgctaaaaatattgcgttcttccagtgctttttgcacatcgcccgccatacctaatttcgttaacatattgtcagtgacaattaaggtacgggtaaatccataatctgccatcatattcattgcatcagtcaaactatcagcgccgatgacattcacagaaggaataaagaacgtactagctgccataacacactcctgaaagtgtaaaaaagggcgggcagcttactgaggattttcattcgaaaatatgatcagtattattgattatcaaaattaatctaataaaaagcacattgtattcattaaacaatgtgctttttttaaattcataagaattttgtattaatttattttaaaacttaattaatcatttccttatttttccggaaataataatgcgtcgcgcaataaatgatcatttccacgacgacgcgtaaagccaatgcggtcaaaatattccagaatctgaattgccagctttcggcctacgcctaagcgatcgcggaaatccgccgcgcaggtactaccacactcctgatcgagatcgcggatcatattggcaaactcgacaatccgatcgttacggtaataacgatctttaacgatcgcggtaattattccttgctgcgccgcctggcgtagagtcaggcgcattgcctgctcgtcggttcccgtctcttttgccaggtcacgcacccaccacggttcgtcaccaaacagtggctctgctttttgccagatggcctgctgctcttcgctgaagcccgctttgtgatctggcagatgcagccagccgtgatggctgtggatgtcgccgctttcgcgcatcttttcaatcagcaacagtaccagcgcttcatcttccattggcaacgccatacgtcgcagacgttcgcgcccagggccaggttcatcgcgatgttgctcatgataagtcgctaatgtgtcgagaattttccgctgccagcgggcggcaaccggcgcattcaacaagctataaccagcctgaatataaccaggctgttgcagcaattcgcgcatcccttcgccgttgagctggcgcgcccaggcgaaatccgcaaggttaaccgcgccgcgttccagatgaacagataacgcatcggcatcgctctgcgcccgtgcaagagacgccagccattgcagatattccggcttacgtttaccgcgacgcggcgggttaagcatcacgacgcgcgctccggccagcgtgttgcgggcagagatatcgcgcaataccaggcggtcgttatctgccagccataacggggtgtcgaagaccagttcagcaaggttatcttccagcagactaacgcgtcccgtgacgtggctggcggcgtggtgaatatgcagcggctgccactgggtcagcggtgtatgggtttgaagctcgacaatcacccgtgtgaacggctctggcggcacatcggcaagcagccagtcgccacggttaatctgctctttttccgcatcacccgcgatgttaagcgcgatacgctgcccggcattggcggtttctgttggctggttttgcgcatgcagcgcacgtacacgcatcggtttatttacaccagtcagccagagactatcgcctaccttcacttccccgcttaacgccgtaccggtgacgaccagcccggcaccttttacggtaaatgcgcggtcaatcgcgaggcggaaactatgttggctggcgtgctcgcgttccggcaactgaagcagatgctcgcgcagggcatccattccccgaccttcggttgctgcggtgataaacagttttgcctcagcaaaaccgtattcccgcagaacctcctttacctggcgttcaacctcatcaacacgcgcttcgtccacgcgatcggctttggtcagcgccactgtcagcatcgggttaccggtcagctgcaaaatcgccagatgctcacgggtctgtgccatcacgccgtcatcgcacgccaccaccaacagcgcgtgatcgataccaccaacgcccgccagcatgttggaaagaaacttttcatgaccgggaacgtcgataaaaccaggcacgcgaccatccggctgcggccagtaggcatagccgagatcgatggtcatgccgcgctttttttcttccggcagacggtcagcatttacgccagtaatcgcctgcaataaggttgttttgccgtggtcaacgtgtccggcagtcgcaataatcatttcaacaacatctccaaaaaccgttgctcatcttcaaggcagcgtaaatccagccacaatcgtccgtcataaatacgaccaatcaccggcactggcaattcacgccagcgggcggctaaactctcaaggtggctaccgcgtccatcatggggtgtaaacgttaatgccgcgctcggcaggcgatcaaccggcaggctaccactgccaatctggctaagacatggcataacctgtaccgcaaactccgcgccgtaatgtgcggcaaggggggcctgtaaacgttgtgcctggatttgaatgacctctgcgctgcgggtaagcaggcgcagggtcggtaatttttcactcagagcttcagggtgtaaataaagacgcaacgtggcttccagcgccgcgagggtcattttatccgcgcgtaatgcacgcttcagcgggtggctttgcaggcgggcgatcatctcttttttaccaacaataattcctgcctgcggcccgcctaacaacttgtcgccggagaaactcaccagactgacgcccgccgcaatcaactcctgcggcattggctctttcggcaaaccgtactggctaagatcgaccaggctgccactgcctaaatcagtcactacgggaacatccagctctttgccgagcgccaccagttccgcttcatctatcgctttggtgaacccctgaatgctgtagttactggtatgtactttcatcaacagtgcggtattttcattcaccgcctgacgataatcattcgcgtgcgtgcggttggtggtccctacttcgtgtagggtgcagcctgcctgacgcataacatcgggaatacgaaacgcgccgccaatctccaccagttcgccgcgagataccaccacctcttttccgctggcagtggccgccaacatcaataacaccgccgccgcattgttattgacgatacaggcatcttccgcccccgtaatacggcacagcagctgcgccagcgcccgatcgcgatgtccgcgtccggcgtcgtccagatcatactcgagggtcactgggctacgcatagcctgcgcaacggcttccaccgcggcttccgcctgtaaagctcgcccaaggttggtatgcagcacggttcccgtcaggttgatcaccggacgcagcgcgctctgcgcttctttcgtcaaccgggcatcgacttcttgcgcccagttttcacaccacgcaggcagcgtctggctgccacgaatcacttctcgcgcttcgtcgagcatctgacgcaacaattccaccacgcgggtgtgaccataagtatcacgcaaagaaaggaaggagctatcgcgcaataagcgatcaatagccggaagttgactatagagggaacgcgtttcggttgtcataggaaacctggctgatcaaggccctctcacacggagaagggcgtttaacataaccacggattgtaacgtgagatgggtcaggaggacatatcgcgcatcaagcctttggcggttcggtgcgagcaaaactttcgcggctaaacaggttttcgaccagtttgactaagtgtgggcggtcgacacaccaacctggcgcaacgcggcggaaattgagatatccgacggcacaggcaatggcgatagtcgccagattgaccgtatcggttttgagtgtgccatcgaccagatatccttccagcacatccagactgcggttgattttctcccgctggcgtaacaattcatcttcagactgctgcgccgctggacgcgcctgttcacgcacgcttaccagcccggcatccataatgccatccgccagtgcctcaattttgcgcacccgcaagctctccagcggatcgcgcggcaacatcgccggagcgacattcattaattcaatatattcagcgatgatcgggctatcaaaccagcattcgccctcttcggtcaccagcaccggcacttttcctaacgggttaaattgcgccacgccgttgtccgcgttatagggcagttcattaataaattcgaaagttatgcccttttctaacaacagaatagaaagtttgcgtacaaacgggctggtgtagctaccgacgagtttcatgccgagtcctttgtgcgaggaaaaatatcagtatggctcaatgatccaaataaagataatgcatccagctggtcattcttagcagcactttccgcatcacgctaacatggctgaaatggtcggagtaaaccgccacctgggcgtagatgccgtcgggtaaggcatcgatatcatcgttagggtccagttcaatggttcccagcacaccgtccgtgccgggcacgaccgttaaactttgcaataccccctgcgcctgataagaaccgcctggcacgacaggtaaaatactagtcagtttgccgtgaaacacctgcccaggtagcgcgttaaacaccacttccgcatcatcgccaggtttcagacgtaacaggctgttttgccgaaattgggcgacaatttgccgtttttgctcggggatgaagaccatcaccggacgcagcggcaaggcagctgcgtatgtacctgggcggatcagtacctgagtaacgtagccattgctcggcgcgcgaatgacagtctgctcaaggttatattttgcttcagtaagttgcgctcttaagctcacaatctggctttgctcgccgttaaccatactgtcgagctggctctggatctgcgcctgctccgccacgctgcctttcaccagcgcatcctgcgcgaggaaattttgccgcgcatcgtcgatgtcacgttcgctgaacggattcaccgccgcctggctgcctttcaagtaacgttgataatttttaaacagacggtcgcgctccgcactaacctgggtggtgttggcctgcgcttcagtgagctgcgcacgcagcgtctttatattatgcgtcgccgtcatcaggtcagcctgaagtctgtcaactcgcgcctggtaacgaaccgggtcgagcttaaaaagcacctcgcccttttgaataagctgattattcttgtcagtgacttcagtaacaattcccgtcacctgtggcgtgatagggatcgctatcactgccttttgcgcggtaaaagtgtaagggtggttgtagttcatcaacaaaatcaaaccactcaccagaaacacgcctcccagcgccgccgtcgccagcgtccactgatttaccggaatgcggaagattttaaagaccgcccacgccagcgccacgtaagttaaaacaatcaatagatccataattagatctccgggaacgtggaatagtcagtctttttctcggcggcgagttgatgctccaaccgggaaattcggtcagaaagtgcggcgatttccgggtcagtcgctttctcctggctcgcaacatgactctgcataccccagccacgctccggttgatagagcgtcgcccagatccacagaaacggccagataacatgcagagtaaacaggctcacccagcccgccgtatgaatagcgtcggcatggggatggttgcgctttttggcaatcagataagggatgtcatgtatcgcgatgattccataaaaaatcaccagaaagacgaagatcagcactcccaacgcgaaatagtttagaaacatatctgcctcggattcacgtttatcagtgttgtttttgggctggcagccagaagggagtcaggctgatattttgacaataatccgggttcgcgattctcgccataacaccaaagaataatttttagaggtgatgagttgcttagttacataacgattgtatgacgaaggcataacatgctgtagatcacatcaggtgaacgccgtaagaaaatatcttgtgattcagatcacaaagattcaacaaaccatcaaaacaaaaatgtgacactactcacatttaaatgccatttttagcgaaaatcgccgccttgttgcttttttacacaagcgttttgtgatgaacgtcacgtcaattacctctctaccccctatatttatgtgattgatatcacacaaaaggccgtcgactggacagttaaccgattcagtgccagatttcgcagtatctacaaggtccggctacctctgccgccacattaacaaaaaacctcgggcttccagcctgcgcgacagcaaacataagaaggggtgtttttatgagttccgatattaagatcaaagtgcaaagctttggtcgtttcctcagcaacatggtgatgccaaatatcggcgcgtttatcgcgtggggtatcatcaccgcgttatttattccaacagggtggttaccgaacgagacgctggcgaagctggtcgggccgatgatcacttatctcctgccgctgctgatcggttataccggtggtaagctggtaggcggcgaacgtggcggcgtagtcggtgccatcaccaccatgggcgttatcgtcggcgcagacatgccgatgttcctcggttctatgattgcaggtccgctgggcggctggtgcattaagcacttcgaccgctgggtagacggtaagatcaaatccggttttgagatgctggtgaataacttctccgcaggcatcatcgggatgatcctcgctattctggcattcctcggcattggcccgattgttgaagccctgtccaaaatgctggctgcgggcgttaacttcatggttgtccatgacatgctgccgctggcgtctatctttgttgaaccggcgaaaatcctgttcctcaacaacgccattaaccacggtatcttcagcccgctgggtattcagcagtcccatgaactgggtaaaagtatcttcttcctgattgaagctaacccaggtccaggtatgggcgtgctgctggcgtacatgttctttggtcgtggtagcgctaaacagtctgcgggcggtgcggcaatcatccacttcctggggggtatccacgaaatctacttcccgtatgtgctgatgaatccgcgtctgatcctcgcagtcatcctcggcggtatgactggcgtgttcacgctgactatcctgggcggtggtctggtttctccggcatctccgggttctatccttgctgtactggcgatgacaccaaaaggtgcttacttcgctaacatcgcgggtgtgtgtgcggcgatggctgtctccttcgttgtctctgctattttgctgaaaaccagcaaagtgaaagaagaagatgatattgaagcagcaactcgtcgtatgcaggacatgaaagctgagtctaaaggcgcatctccgctgtctgctggcgatgtgactaacgacctgagccacgtacgtaaaatcatcgttgcctgtgacgccggtatgggttccagtgcgatgggcgcaggcgttctgcgtaagaaaattcaggatgcaggtctgagccagatttctgttactaacagcgcgatcaacaacctgccgccagatgtggacctcgtcatcactcaccgtgacctgaccgaacgcgctatgcgccaggttccgcaggcacagcatattagcctgaccaacttcctcgacagcggcctgtacaccagcctgaccgaacgtctggttgctgcccaacgccacacggcaaacgaagagaaagtaaaagacagcctgaaagacagctttgacgattccagtgctaacctgttcaagctaggcgcggagaacatcttcctcggtcgcaaagcggcaaccaaagaagaagcgattcgttttgctggcgagcagctggtgaaaggcggttacgttgagccggaatacgttcaggcgatgctggatcgtgaaaaactgaccccgacttatctgggtgagtctatcgcggtgccacacggtacggttgaagcgaaagatcgcgtactgaaaacgggcgtcgtgttctgccagtacccggaaggcgtgcgcttcggtgaagaagaagatgacattgcccgtctggtgattggtattgctgcccgtaacaacgagcacattcaggttatcaccagcctgaccaatgcactggatgatgagtccgtcatcgagcgtctggcacacaccaccagcgtggatgaagtgctggaactgctggcaggtcgtaagtaatccaatcccaccctctccacatggagaaggtggggttaattgcctgatgcgctacgcttatcaggcctacaggatgcatcacaatttgttgaatttgcacgttcttgtaggccggataaggcgcttacgccgcatccggcgctgcccctctcctcacggagagggtttgggtgagggaaaagcctcaccccagccctctcgggtaaaaacattgatgaaggttaatactatgaaagcattacattttggcgcaggtaatatcggtcgtggctttatcggtaaactgctggcagacgcgggtatccaactgacgtttgccgatgtcaatcaggtggtacttgatgccctgaatgcccgtcatagctatcaggtacatgtggttggtgaaaccgagcaggtagataccgtttccggcgtcaatgctgtcagcagcattggtgatgatgtcgttgatctgattgctcaggttgatttagtcactaccgccgttggcccggttgtgctggaacgtattgctccggcaatcgccaaagggcaggtgaaacgtaaagaacaaggtaatgaatccccgctgaacatcatcgcctgtgaaaacatggtacgcggtaccacgcagctgaaaggccatgtgatgaacgccctgccggaagacgccaaagcgtgggtagaagaacacgttggctttgtcgattccgccgttgaccgcatcgtaccgcctagcgctagcgcaactaacgatccgctggaagtgacggtagaaaccttcagcgaatggattgtcgataaaacgcagttcaaaggcgcactgccgaacatcccaggcatggagttaaccgacaacctgatggcatttgtcgaacgtaaactcttcaccctgaacacgggtcatgctataaccgcgtacctcggaaaactggccggtcatcagaccattcgtgacgcgattctcgacgagaaaatccgcgcggtggtaaaaggtgcgatggaagaaagtggtgcagtattgatcaagcgctacggctttgacgctgacaagcatgcggcgtacatccagaaaattctcggccgttttgagaacccgtatctgaaagatgatgtagagcgcgtaggccgtcagccactgcgtaaactgagtgctggcgaccgtctgatcaagccactgctcggtacgctggaatatggtctgccacataaaaacctgattgaaggtattgccgctgcaatgcacttccgcagtgaagatgatccgcaggctcaggaactggcagcactgatcgctgacaaaggtccgcaggcggcgctggcacagatttccggtcttgatgccaacagcgaggttgtatccgaggcggtaaccgcttataaagcaatgcaataatggtggaccaggcgcaggacaccctgcgcccgaataacagattgagtgatatgcaggcaacaatggaacaaacccaggcctttgaaaaccgtgtgcttgagcgtctgaatgctggcaaaaccgtgcgaagctttctgatcaccgccgtcgagctcctgaccgaggcggtaaatcttctggtgcttcaggtattccgcaaagacgattacgcggtgaagtatgctgtagaaccgttactcgacggcgatggtccgctgggcgatctttctgtgcgtttaaaactcatttacgggttgggcgtcattaaccgccaggaatacgaagatgcggaactgctgatggcattgcgtgaagagctaaatcacgacggcaacgagtacgcctttaccgacgacgaaatccttggaccctttggtgaactgcactgcgtggcggcgttaccaccgccgccacagtttgaaccagcagactccagtttgtatgcaatgcaaattcagcgctatcaacaggctgtgcgaagtacaatggtccttagtctgactgagctgatttccaaaatcagcttaaaaaaagcctttcaaaagtaagcaacgtctgcttactgcccctctacctgcttcggccgataaagccgacgataatactccagacgttgtagatataacggcacgctttcatcgggtattccggacggaatcgcgttacggggaggaagttttttcagatactcccggaacgcctggctacttgccatgaaatctacggctttatcgataagaagcggaacgttttcacctaatttgcccatgatgatatctccgtattaccccgcgccgggaatgcgcggccgccaattttagtttaggttcccggtaaagatgacattaaggaaaacgtgctgaatcctcaataatcatccgctgctgtttattatcttttttctatagatttcttaattaatcaacgaattgcgcagtttttgagcatgttaatgattacgttacagaactattacaatgtcattagttgtgaacaaagcacctggtcgcgcatactaggggctataaatttatctttatcagaagccatcacatgaaagaagtcgaaaaaaacgaaatcaaacgcctcagcgatcgcctggacgccatccgccaccagcaggccgatcttagcctggttgaagccgcagacaaatatgccgagctggaaaaagagaaagccacgctggaagcagaaattgctcgcctgcgtgaagttcatagccaaaaactgagtaaagaagcacagaagctgatgaagatgccattccagcgcgcaattaccaaaaaagagcaggctgatatgggcaagctgaagaaaagtgttcgcggactggtcgttgtgcacccaatgaccgcactgggccgcgaaatgggcctgcaggagatgactgggtttagtaagaccgcgttttaagaacacagtatctacagggtgattctgcacattcctataggccgagtaaggtgttcacgccgcatccggcaagataaggcgctctggatcaacaacctaagggcaattctctgatgaggattgcccttttctttaccagacatctccccccacaagaattggccctaccaattcttcgcttatctgacctctggttcacaatttcccaattaaaactcacatcaatgttgccaatacataacatttagttaaccattcattgtcattatccctacacaacacaattggcagtgccacttttacacaacgtgtgacaaggagatgagcaacagactcattacacgatgtgcgtggactccaggagacctgcaatgaatctctggcaacaaaactacgatcccgccgggaatatctggctttccagtctgatagcaagccttcccatcctgtttttcttctttgcgctgattaagctcaaactgaaaggatacgtcgccgccagctggacggtggcaatcgcccttgccgtggctttgctgttctataaaatgccggtcgctaacgcgctggccagcgtggtttatggtttcttctacgggttgtggcccatcgcgtggatcattattgcagcggtgttcgtctataagatcagcgtgaaaaccgggcagtttgacatcattcgcagctctattcttagcataacccctgaccagcgtctgcaaatgctgatcgtcggtttctgtttcggcgcgttccttgaaggagccgcaggctttggcgcaccggtagcaattaccgccgcattgctggtcggcctgggttttaaaccgctgtacgccgccgggctgtgcctgattgttaacaccgcgccagtggcatttggtgcgatgggcattccaatcctggttgccggacaggtaacaggtatcgacagctttgagattggtcagatggtggggcggcagctaccgtttatgaccattatcgtgctgttctggatcatggcgattatggacggctggcgcggtatcaaagagacgtggcctgcggtcgtggttgcgggcggcagctttgccatcgctcagtaccttagctctaacttcattgggccggagctgccggacattatctctagcctggtaagtctgctctgcctgacgctgttcctcaaacgctggcagccagtgcgtgtattccgttttggtgatttgggggcgagtcaggttgatatgacgctggcccacaccggttacactgcgggtcaggtgttacgtgcctggacaccgttcctgttcctgacagctaccgtaacactgtggagtatcccgccgtttaaagccctgttcgcaagcggtggcgcgctgtatgagtgggtgatcaatattccggtgccgtacctcgataaactggttgcccgtatgccgccagtggtcagcgaggctacagcctatgccgccgtgtttaagtttgactggttctctgccaccggcaccgccattctgtttgctgcactgctcagcattgtctggctgaagatgaaaccgtctgacgctatcagcaccttcggcagcacgctgaaagaactggctctgcccatctactccatcggtatggtgctggcattcgcctttattagcaactattccggactgagtagtacactggcgctggcactggcgcacaccggtcatgcattcaccttcttcagcccgttcctcggctggctgggggtattcctgaccgggagcgataccagttctaacgccctgttcgccgcgctgcaagccaccgcagcacaacaaattggcgtctctgatctgttgctggttgccgccaataccaccggtggcgtcaccggtaagatgatctccccgcaatctatcgctatcgcctgtgcggcggtaggcctggtgggcaaagagtctgatttgttccgctttactgtcaaacacagcctgatcttcacctgtatagtgggcgtgatcaccacgcttcaggcttatgtcttaacgtggatgattccttaatgattgttttacccagacgcctgagtgacgaggttgccgatcgtgtgcgggcgctgattgatgaaaaaaacctggaagcgggcatgaagttgcccgctgagcgccaactggcgatgcaactcggcgtaagtcgtaatagtctgcgcgaggcgctggcaaaactggtgagtgaaggcgtgctgctcagtcgacgcggcggcgggacgtttattcgctggcgtcatgacacatggagcgagcaaaacatcgtccagccgctaaaaacactgatggccgatgatccggattacagtttcgatattctggaagcccgctacgccattgaagccagcaccgcatggcatgcggcaatgcgcgccacacctggcgacaaagaaaagattcagctttgctttgaagcaacgctaagtgaagacccggatatcgccagtcaagcggacgttcgttttcatctggcgattgccgaagccagtcataacatcgtgctgctgcaaaccatgcgcggtttcttcgatgtcctgcaatccagtgtgaagcatagccgtcagcggatgtatctggtgccaccggtttttagtcaactgaccgaacaacatcaggctgtcattgacgccatttttgccggtgatgctgacggggcgcgtaaagcaatgatggcgcaccttagttttgttcacaccaccatgaaacgattcgatgaagatcaggctcgccacgcacggattacccgcctgcccggtgagcataatgagcatagcagggagaaaaacgcatgattatttccgcagccagcgattatcgcgccgcagcgcaacgcattctgccgccgttcctgttccactatatggatggtggtgcatattctgaatacacgctgcgccgcaacgtggaagatttgagtgaagtggcgctgcgccagcgtattctgaaaaacatgtccgacttaagcctggaaacgacgctgtttaatgagaaattgagcatgccggtggcactggctccggtgggtttgtgtggcatgtatgcgcgtcgtggcgaagttcaggcagccaaagcggcggacgcgcatggtattccgtttactctcagcacggtttccgtttgcccgattgaagaagtcgcgccagccatcaagcgcccaatgtggttccagctttatgtactgcgcgatcgcggctttatgcgtaacgcgctggagcgagcaaaagcagcgggttgtagcacgctggttttcaccgtggatatgccgacaccgggcgcacgctaccgtgatgcgcatagtggtatgagcggcccgaacgcggcaatgcgccgctacttgcaagcggtgacacatccgcaatgggcgtgggatgtgggcctgaacggtcgtccacatgatttaggtaatatcagtgcttatctcggcaaaccgaccggactggaagattacatcggctggctggggaataacttcgatccgtccatcagttggaaagaccttgaatggatccgcgatttctgggatggcccgatggtgatcaaagggatcctcgatccggaagatgcgcgcgatgcagtacgttttggtgctgatggaattgtggtttctaaccacggtggccgccagctggacggtgtactctcttccgcccgtgcactgcctgctattgcagatgcggtgaaaggtgatatagccattctggcggatagcggaattcgtaacgggcttgatgtcgtgcgtatgattgcgctcggtgccgacaccgtactgctgggtcgtgctttcttgtatgcgctggcaacagcgggccaggcgggtgtagctaacctgctaaatctgatcgaaaaagagatgaaagtggcgatgacgctgactggcgcgaaaagcatcagcgaaattacgcaagatagcctggtgcaggggctgggtaaagagttgcctgcggcactggctcccatggcgaaagggaatgcggcataatcgtttgcgccccctcaccctaaccctctccctcagggagaggggaccgttcggcgctgtatgtactccctcactctgaaacgacaccgcactctttttttctccctcgcccctccggggagagggccggggtgaggggaaaaggccgcactgctcaccaattttctgctatcctgcccccgcactaagggggcagtatgctaaacatcgtactttacgaaccagaaattccgccaaatactggcaacatcatccgtctttgcgctaataccggctttcgtctgcatatcatcgaaccgatgggatttgcctgggacgataagcgcctgcgccgcgcggggctggactatcacgagtttaccgccgttacgcgtcatcatgactatcgcgcgttcctcgaagcagaaaatccccagcgcctgttcgccctcaccacgaaaggtacacctgctcacagcgccgtaagctatcaggatggcgattatctgatgttcggcccggaaacacgcggcctgccagcgagcattcttgatgccctgcccgctgaacaaaaaattcgcattccgatggtgccggacagccgcagcatgaatctgtccaatgcggtgagcgtagtggtgtatgaagcctggcggcagttggggtatccgggagcggtattgagagattaattactgtaggccggatagatgattacatcgcatccggcacgatcacaggacattagatcccatccccatactcaaatgtatggttaataccgttgaaatgctggtccatatccatacttggcttatcgctgtctggtttaccgacaatacgagccggaacgccagcggcggtggtatgcggcggcaccggttgcagcaccacggaacctgcgccaatcttcgcgccgcgcccaacttcaatattgccgaggattttcgcgcccgcgccaatcatcacaccttcacgaattttcgggtgacggtcaccaccagatttacccgtaccgccaagcgtcacagattgcagaatgcttacgtcgttttcaatcaccgccgtttcaccaacgacgatgcctgtcgcgtggtcaagcatgataccgcgaccaatttttgctgccgggtgaatatcgacctggaacgtcacagaaacctggttttgcagaaagattgccagtgcgcgacgcccctgattccacaaccagtgaccgatgcgataggcctgcaaggcatgaaaacccttcaggtataacaacggggtactgtatttatcgactgccgggtcgcgggtacgcaccgcctgaatatcacaggccgcagaggcgatcatttccgggtcagcggcgtaggcttcttccaccacttcacggatagcaatagcaggcataattgggctactcagcttgttcgccagcatgtagctcagtgcactgccaaggttttcgtgcttgagtagcgtcgcgtggtaaaaactggccagcattggctcacagtccgccagcgttctggcttcggctttaatattgttccagacaatttccagttcttcacagctcattgcttactccacacgatgagataatgaccggcccgttctgcgcgggccgggtcatagcggtaacaaaggttccctggggttagtggctgctgcgctcgtccttgcgtgcacgacctagtaaagtcaatgctgcctcgcgcgcgttttttccgcaatataatacttgataaatttcctcggttattggcatttcaacgccgaagcgatgcgccagttcgcggacttctttcgtattgcggtagccttccaccacctgaccaatcttctcctgcgcgctttgtacatccatgccctgaccgagcatcatgccaaaacggcggttacggctctggttgtcggtacaggtaagcaccagatcgccaagccccgccatgcccataaaggtggcagggtcggcacccagcgccgcaccaagacggctcatttcagccagcccacgggtgatcagcgccgtacgcgcattcgcaccaaaaccgataccgtcggacatccccgcaccaatggcaataacgtttttcaccgcgccgccaagctgcacgccaatgaaatccggattgctgtaaacgcggaaacttttgccgcagtgcagcagctgctggagatcatcggcaaaggtctgatcggtgctggccaggctaatagctgtcggtaaacctgccgccagttctttcgcaaacgttgggccagagataaccgccagcggaatttgatcgcctaaggcctcacgcgccacgtcctgtaacagacgtccggtttccgcttccagccctttggtcgcccacaccagacgcgcatcaggacgcatcagtggtttaatctggcgcagcacttcaccaaagacatggctgggtacgacgacgagaatattacggctggctgccagcgcagtggcgagatcgctttcaagatggagcgtatcgggaaaaggcacatcggggagaaacgcggcgttacagcggtcgcgttcaagcgttgcgatatgttcagggtcatggccccagaggacaacctcgtggccatttcttgccagggtgatggcaagagcggtgccgtagctgccggcaccgatcacagtcatactagcattacgttggttcatcaggcatcctgatgttcttcagtaccttcgccagcctgctgctgcaaatagttcatgaacagcgcatcgaagttaaccggcgcaaggttcagttgcgggaatgtaccgcgggataccatgctggtgatgcactcacgagcatacgggaacagaatgttcgggcagtatgctcccaggcaatgcgccatctgggtgccttcgatacccgcgatggagaaaataccgccctgctgaacttcacacaggaacgcggtttcttcgcccaaagaggccgttacggtaacacgcagtaccacttcgtatacgtcatctgccagttgggaagatgccgtatccagatcaagtttaacttctggttgccaatctttctggaaaacgtgcggcgcgttcggcgcttcgaaagagatatccttggtataaatacgttggatctggaaagtcatttcagtgttgttttgttcactcatgtgtagaaaacccttaagtgttgtccttaaatactgcgcaatgtaatgccaacgttcacacgttatttcagcaggggatccagtccaccacgtgcatccaatgcatacaagtcatcacagccgccaatgtgctgtgcgtcaataaaaatctggggaaccgtggtgcgaccgctgcgtttgatcatctcttcacgcttggcggcgttgccatcgatcggcagctcctggaaactcacgcccttgctgctcagcagtgcttttgcacgatggcaatacgggcaggtttctttggtatagatttcaacattggccataaattagctcctgtttttttaccctgaaatttcatgttgcagggcggcagcaaaatggagtgtccccagaagcttataacaataagtcgctgggggcctaattgcagctaacggcctgcatcatgaaagacgacaggtaaattatttgccgcgcaccaaaggcaagttttcgccagcccagccagcgacgccttctttcagcacgaatacttgcgcaaaaccagctttcgtcagtgcgtttgcaggctcctggcactgcatgccagaaccgtctaccacgataaccggtttgtctttgtgcttctcaagctcaccaacattgttggctttgatttcgctcggcaacagattaatagaacctgcgatatggcctttacggaagtcatcacgctgacgtaaatccacaaccacagcgtcttctttgttgatcagacgcgtagcttcaccacgagtaatcaccttcactttgctggtcaggctcttaaacgtagtcacaagaaccgccaccagtaacgcgatccaggcgatactcagtatgggatgacggccaacaaattgcataatttcttgcatggggggtaacaactcccgacgtagtgattaaaaaaaccaggaaaggagtatacctgcgcggtgcggcaaatacagccagcgcgttaactggaatgcaattttgcggggcgcgacgaaaaaaaagcgtaaatctggcatcggcttgccgcgagcggtcgtatattttgatcttcagaggctattttatcgattcagctgtagtaaaattacgcaaattttgactcttgagtatgaggttgtcgcaatgttggtttctaaaaaacctatggtactggtgattctggatggctatggctatcgcgaagaacagcaggataacgccatttttagtgctaaaaccccggtaatggatgcactgtgggccaatcgtccgcataccctaatcgacgcttccggtctggaagtcggtctgcctgaccgtcagatgggtaactccgaagtaggccacgttaacctgggtgccggccgcatcgtgtatcaggacctgactcgtctggacgttgaaatcaaagatcgcgctttctttgctaatccggtgctgactggcgcggtagataaagcgaaaaacgcaggcaaagcggtacacattatgggtctgctctccgcaggcggcgtacacagccacgaagatcacatcatggcgatggtagaactggcagctgaacgcggcgcagaaaaaatctacctgcacgcattccttgacggtcgcgacactccgccgcgcagtgctgaatccagcctgaaaaaattcgaagaaaaatttgccgcgctgggcaaaggccgcgtagcgtccatcattggtcgttactacgcgatggaccgcgataaccgttgggatcgcgtagaaaaagcttatgacctgctgactctggcgcagggcgagttccaggccgataccgccgttgctggtttgcaggctgcttatgctcgcgacgaaaatgatgaattcgtgaaagcgaccgttatccgtgctgaaggtcagccagacgcggcaatggaagacggcgatgcactgattttcatgaacttccgtgctgaccgcgcgcgtgaaatcactcgtgctttcgtgaacgctgatttcgatggcttcgcgcgtaagaaagtggttaacgtcgatttcgtgatgctgaccgaatacgccgctgacatcaaaactgcggttgcttacccacccgcttccctggttaacaccttcggcgagtggatggcgaaaaacgacaaaactcagttgcgtatttccgaaaccgaaaaatatgcccacgttactttcttcttcaacggtggcgtagaagagagcttcaaaggcgaagatcgcattctgatcaacagtccgaaagtggctacctacgatctgcaaccggaaatgagctccgcagagctgaccgaaaaactggttgcggccatcaagagcggcaaatacgacaccatcatctgtaactatccgaacggcgacatggtaggtcacaccggggtgatggaagcggcggttaaagcggttgaagcgctggatcactgcgtggaagaagtcgcgaaagcggttgagtccgtgggtggacaactgctgatcaccgctgaccacggtaacgctgagcagatgcgcgatccggcaacgggtcaggcacacacggcacacaccaacctgccagttccgctgatttacgttggtgataagaacgtgaaagcggttgaaggcggcaaactttctgacatcgcgccgaccatgttgagcctgatgggtatggaaatcccgcaagagatgactggtaagccgctgttcatcgtggaataatccctccccatgaggggaaaggcgattaataccatgacacgggccgtgaaaccgcgcaggtttgcaatcaggcccatcatctacgccagcgttcttagcgctggcgtattgttgtgcgccttttccgcccacgcggatgagcgtgaccaactcaaatctattcaggctgacatcgccgcaaaagagcgcgcggtacgccaaaagcaacaacaacgcgcaagcctgctcgcacaattgaaaaagcaggaagaagcgatctctgaagccacccgtaagctgcgcgaaacgcaaaacacgctcaatcaactcaataaacagattgatgagatgaacgcgagcattgccaaactggagcagcaaaaagccgcccaggagcgcagcctcgccgcacaactggatgccgcattccgtcagggcgagcataccggtattcagctgattctcagcggtgaagaaagccagcgtggacagcgtttacaggcttatttcggctatctcaaccaggcgcgacaagaaaccattgcccagttgaagcaaacgcgtgaagaagtcgccatgcagcgtgctgaactggaagagaaacagagcgagcaacaaacgctgttatatgagcagcgcgcccaacaggcgaaactgactcaggcgctgaacgagcgtaaaaagacgctggcagggctggagtcttccatccagcaaggtcagcaacagttgagcgagctgcgcgccaacgaatcccgtctgcgtaacagcattgcccgtgcggaagccgcggcgaaagcgcgtgcagaacgagaagcacgtgaggcccaggcggttcgcgaccgccagaaagaagcgacgcgcaaaggcaccacctacaaaccgaccgaaagcgaaaaaagcctgatgtcccgtaccggtggtctgggcgcgccgcgtggtcaggcattctggccggttcgcgggccgacgctgcatcgctatggcgaacagctacagggtgaattacgctggaaaggtatggttatcggtgcttctgaaggtactgaagttaaagcgattgccgacggtcgggtgattctggctgactggctgcaaggctacggtctggtggtggtggttgagcatggtaaaggcgacatgagtctttacggctataatcagagcgcactggtgagcgttggtagccaggttcgcgcgggccagccgattgcactggtgggcagcagtggcggtcagggtcggcctagtctctatttcgaaattcgccgccagggtcaggcggtcaatccacagccgtggttgggaagataagttttgtttccatttcgtcgtaacgttcttgcatttgccgctctgttggcgctctcctcccccgtacttgctggcaaacttgccatcgtcattgatgattttgggtatcgcccgcacaacgaaaaccaggtgctggcgatgccttccgctatctccgtcgctgtattacccgatagtccgcacgccagagagatggcgaccaaagcgcataacagcgggcacgaagtgttgattcatctcccgatggcaccgttgagtaaacagccgctggagaaaaatacgctacgcccggagatgagcagcgacgaaattgagcgcattattcgtagtgcggtcaataacgtgccctatgccgtggggatcaacaaccacatgggcagcaagatgacctctaacctgtttggtatgcagaaagtgatgcaggcgctggagcgttacaatctttacttcctcgacagcgtaaccatcggtaatacccaggcgatgcgcgccgcgcaaggcactggcgtgaaggtgatcaaacggaaggtattcctcgacgatagccaaaatgaagcggacatccgtgtgcaatttaatcgcgcaattgacctggcgcgtcgcaacggtagcaccattgccattgggcatcctcaccctgcaacggtacgcgtgttgcaacagatggtttataacctgccgccagacattacgctggtgaaagccagcagcttgctgaatgaaccgcaggttgatacttctacaccgccgaaaaacgctgtgcctgatgcaccgcgtaatccgttccgtggcgtgaagctgtgcaaaccgaagaaaccgatagaacctgtttatgctaatcgcttctttgaagtattaagcgaaagcatcagccagagcacgctgatcgtttacttccagcatcagtggcaaggctggggcaaacagcccgaagcggcgaagtttaacgctagcgcaaattaattagcgcaaattaaaggcgctacgcgtaatgcgatggtggctccgcgttttgtcgcgccattgccataagcggaaagaccacagtaacgcctggtaaccgaccttcacgctgcgcacattggtaatcaggcgcttatacataccggaagtaaatatctcggcaatcatccgttggcgggtaagaatatccggctctttgcgcaccgcatggcaaacacgcaatgcctcgtaagttatttgctgatgaaattccggataaatcataattttgtcggcataatttcgatttaatttctccagcaggcgggtaatcttaatatagtgacgttgataattaaggtttttattcccttgtctatgcaaccgactcacactcgtattatgcagataatatttatataaactttgctcggtatatcgcgcacgcagcgcgttaaacatgaattctgttgtccagacaatatcctgatgatgtaatccggcaataaatttaatgttatttttaacaataacatcacggcgataaacccccatccagacaacgtgagtccaacggcggctagaaagccccatccgcagccagtccgggccggttaatacgccggtactgcgaaggcgatcggtggggatggattgccaggtttctcccgtttcacgaaaacaccagtcagcgttgcactgcgccacgtcgaggtcgtcctctaacgccatggtcatcagcgtttcgtacatggtgggatagacttcatcgtcagcatcgacaaaagcgacatatttgcccgttgccacttcaatcccacgattacgcgccacgcttgcgccagcattcgcctgatgcaacaaacgaacgtgcggatagttttctgcgtaatactttgctatttcaacagaattatccgtactaccatcgttaataataatgatttccagagcagtccaggtttgcgtaattaaagattccatacaagtgcggaaatcatcgcccgcattatataacggaataataacactaagtttattggtgctgttcatcataaattaccgacgacctctgaagttatcctgacgttttacaggctttgtattaagaaactattaagcctgtgagatattatttttacaggtgagagagtcacttcagggtagagagataatgagagcagctatataagagatcagcacaattacgaactctttattacactgacaggattttacatatttaacagattatcctcagataaaagggctggaataccagcccttgttcgtgttaatcccagctcagaataactttcccggactggccgctacgcatagcgtcaaagcccttctggaaatcatcgatagagaaacgatgggtaatgatcgggctaagatcgaggccagactgaatcagcgccgccatcttgtaccaggtttcaaacatctcacgaccgtaaatacctttaatgaacaagcctttaaagatcactttggtccagtcgatagacatatcagacggcggaatacccagcatcgcaatacggccgccgtgattcatggtgtcaagcatggtacgaaacgctggcggcgcaccggacatttccagaccgacatcaaaaccttcggtcatgcctaactccgccatcacgtcattgagattttctttggcgacgttaaccgcacgggtgatacccattttacgcgccagctcaaggcggtattcgttaacatcagtgatcaccacattgcgtgcaccaacgtgtttcgccaccgccgctgccataataccaatcgggcctgcaccagaaaccagcacatcttcgcccaccagatcaaagctcagcgcggtatgcacggcgttaccgaagggatcaaaaattgcggctaagtcatcggaaatattgtcggggattttgaaggcgttgaatgccgggatcaccagatattcggcaaagcagcccgggcgattaacaccaacgcctatcgtgttgcggcacaaatgggtacgaccaccacgacagttgcggcaatgaccacaggtgatatggccttcgccagaaacgcgatcgccgatcttgaagcctttcacttcctgaccaatacctaccacttcaccgacatattcatggcccacgaccatcggcaccgggatggttttttggctccactcatcccagttatagatgtgaacgtcagtcccgcagatggctgttttacggattttaatcagcagatcgttatgcccgagttccggtacaggaacgtcggtcatccagatgccctcttccgctttcagtttggataacgctttcatctcacatcctcaggcgataacgcccagttgtttaccaatacgcgtaaatgcttctactgcacgcgtaatttgctcaggggtatgcgccgcagacatctgggtacgaatacgcgcctgacctttcggaacgaccggatagaagaaaccggtaacgtaaatgccctctttttgcagctcacgggcaaatttctgcgccactaccgcatcaccaagcatgaccggaataatggcgtgatcggctcccgccagggtaaagcccgccgcgctcatttgctcacggaactgacgcgcgttcgcccacagacggtcacgcagttcgctgcccgcttcgaccatctccagtactttgatggacgcggcaacaatggccggtgccaggctgttggagaacaggtacggacgagaacgctggcgcagccactcaaccacttctttgcgcgccgcggtataaccaccagaagccccgcccagcgctttaccaagcgtaccggtgataatatcgacccggcccatcacatcgcagtattcatgggaaccacgaccattttcaccgacaaaaccgaccgcgtgggagtcgtctaccatcaccagggcatcatatttatctgccagatcgcaaacgcccttcaggttggcaatcacgccgtccatactgaacacaccatcggtggcgatcagcacatgacgcgcaccggcttcacgcgcttctttcagacgtgcttccagctcctgcatatcgttgttggcatagcgatagcgtttagctttgcacagacgcacaccatcaataatagacgcgtggttcagtgcgtcggagataatggcgtcttccgcacccagaagcgtttcaaacaggccaccgttagcatcaaagcaggaagagtagagaatcgcatcttccatccccaggaaggccgccagtttttgttcaagctctttatggctgtcctgagtgccgcaaataaaacgcacgctagccatgccgaaaccgtgagaatccattcccgcctttgccgccgcaatcagatcaggatgattcgccagcccgagatagttgttggcacaaaagttaatgacgtggcttccatcagccacagtgatatctgcttgctgcgcagacgtaataatgcgctcttctttaaacaacccttccgcccgtgcggtttccagatcgttggttaactgctgataaaattctccacgcattgcgattctccagacagggcaaattccagcacatattacccaaacttataggtcgcgacgagataacgcgttaacacttctgcaaaattcaggataaataacgtgtaacttgatgtctctcaacacctacagatagtagaaaaactgtacagttttggctgggcataatgatgattgattttactgcattgatataaaaagaaaaaatgatgccaaagcatcatttttcctatctcagttggtatcaaaacgctacccactaatggagggaaacttattttctactaaggaaaattctcagcgcctgcatttttgcccctaaagtgttactcctgaagcagcgaaacaaatcgaaccattttcctctccccagatagtttaggttgaagagatcggggcgtttgtaatagcacatgacaaaaatgccctggtcatcgtccacaatgttattatttagtgttattttttgactttccagaactaatttatagaattctttccatttatgctgactaccaacaattgcgcccccaataatatatacatgattgccaatcatgaaatcaaaaacctgttgttgagatgtgacagtaagccctttttttatagtgaaaagatgcatcttactttcatcaaatgggaaatcccaaattttcaatcctcgagttacatttggcttatggcaatagccaaaatctatccacgcaacaagaggcgttttcactaagcccatgttgatagctttatttacaaaataggccttaaggttacataccaaaacatactctggactccagtactctgggttttttaattgtcgaggctcaagtctatttgtaaagctctcatctttttgaattttttcgatacgacttctgatatatctaaatttcttttttatatcgataacgataaccgttgttggttttccgttgcgaatcgcttcaacccttggtttcaaatcgggagaagtgaaaataatcatctcattttcaagtgcggccagacgctcaaagtaactaaaataaacatcaacactacgagctagtttttcacggaaccctttattagcagtccaatcccctctaccaatgtcaaaatatgcagtgataattgtggtggaacttttcattactaataagaccattaatataaaaaaagaattatatcataaatattaatagaatgtatactgtatattatccattcaaatgcttccgttatttatcatacatcggaatattgatactaaagcactattcacatgcaaaaccaacatccgccatgaaggactagctaaaacccaaactagtttgttgcaattagcatccttgcacctctatgtaaagggctgaagggattcggatgtgatggtatgattacagacattcgtgtctgagattgtctctgactccataattcgaaggttacagttatgatcatcgttaccggcggcgcgggctttatcggcagcaacatcgttaaagccctgaatgataaaggcatcaccgatattctggtggtggacaacctgaaagacggcaccaagtttgtgaacctggtggatctgaatatcgcagactatatggataaggaagacttcctgatccagattatggctggcgaagagttcggcgatgtcgaagcgattttccacgaaggcgcgtgctcttccaccaccgagtgggacggcaagtatatgatggataacaactatcaatactccaaggagctgctgcactactgcctggagcgtgaaatcccgttcctgtacgcttcttccgcagccacctacggcggacgcacctccgactttattgaatcccgcgagtacgaaaaaccgttgaacgtctacggttacagtaaattcctgtttgatgaatatgttcgtcaaatcctgcctgaagcgaacagccagattgttggcttccgttatttcaacgtttatggaccgcgtgaaggccataaaggcagcatggcgagcgtcgctttccatctcaacacccagcttaacaacggtgaaagtccgaagctgtttgaaggtagcgagaacttcaaacgcgacttcgtctatgtgggcgacgtggctgatgtgaatctgtggttcctggaaaatggcgtttccggcatcttcaatctcggtactggtcgtgcggaatccttccaggcggtagctgatgctacgctggcttatcacaagaaaggccagatcgaatacattccgttcccggataaactgaaaggccgctatcaggcgttcactcaggcagatctgacaaatctgcgcgcggcgggttacgacaaaccgttcaaaaccgttgctgaaggtgtaacggaatacatggcctggctgaatcgcgacgcataagagctctgcatgaaaatactggtgatcggcccgtcttgggttggcgacatgatgatgagccaaagtctctatcgcacgctccaggcgcgctatccccaggcgataatcgatgtgatggcaccggcatggtgccgtccattattaagccggatgccggaagttaacgaagctattcctatgcctctcggtcacggagcgctggaaatcggcgaacgccgcaaactgggtcatagcctgcgtgaaaagcgctacgaccgcgcctacgtcttacccaactccttcaaatctgcattagtgcctttcttcgcgggtattcctcatcgcaccggctggcgcggcgagatgcgctacggtttactcaacgatgtacgcgtgctcgataaagaagcctggccgctaatggtggaacgctatatagcgctggcctatgacaaaggcattatgcgcacagcacaagatctgccgcagccattgttatggccgcagttgcaggtgagcgaaggtgaaaaaagttatacctgtaatcaatttagccttagtagtgaacgtccgatgattggtttttgcccgggtgcggagtttggtccggcaaaacgctggccacactaccactatgcggagctggcaaagcagctgattgatgaaggttatcaggtggttctgtttggcagcgcgaaagatcatgaagcgggcaatgagattcttgccgctttgaataccgagcagcaggcatggtgtcggaacctggcgggggaaacacagcttgatcaagcggttatcctgattgcagcctgtaaagccattgtcactaacgattctggcctgatgcatgttgcggcggcgctcaatcgtccgctggttgccctgtatggtccgagtagcccggacttcacaccgccgctatcccataaagcgcgcgtgatccgtttgattaccggctatcacaaagtgcgtaaaggtgacgctgcggagggttatcaccagagcttaatcgacattactccccagcgcgtactggaagaactcaacgcgctattgttacaagaggaagcctgacggatgcgggttttgatcgttaaaacaagcagcatgggcgatgttctccatacgttgcccgcactcactgatgcccagcaggcaatcccagggattaagtttgactgggtggtggaagaagggttcgcacagattccttcctggcacgctgccgttgagcgagttattcctgtggcaatacgtcgctggcgtaaagcctggttcagcgcccccataaaagcggaacgcaaagcgtttcgtgaagcgctacaagcagagaactatgacgcagttatcgacgctcaggggctggtaaaaagcgcggcgctggtgacgcgtctggcgcatggcgtaaagcatggcatggactggcaaaccgctcgcgaacctttagccagcctgttttacaatcgtaagcatcatattgcaaaacagcagcacgccgtagaacgcacccgcgaactgtttgccaaaagtttgggctatagcaaaccgcaaacccagggcgattatgctatcgcacagcattttctgacgaacctgcctacagatgctggcgaatatgccgtatttcttcatgcgacgacccgtgatgataaacactggccggaagaacactggcgagaattgattggtttactggctgatagtggaatacggattaaacttccgtggggcgcgccgcatgaggaagaacgggcgaaacgactggcggaaggatttgcttatgttgaagtattgccgaagatgagtctggaaggcgttgcccgcgtgctggccggggctaaatttgtagtgagcgtggatacggggttaagccatttaacggcggcactggatagacccaatatcacggtttatggaccaaccgatccgggattaattggtgggtatgggaagaatcagatggtatgtagggctccaagagaaaatttaattaacctcaacagtcaagcagttttggaaaagttaagtagtttataaaggtaaaacatgctaacatcctttaaacttcatagtttgaaaccttacactctgaaaagtagtatgattttagagataataacttatatattatgtttttttagtatgataattgcattcgtcgataatactttcagcataaaaatatataatatcactgctatagtttgcttattgagtctaattttacgtggcagacaagaaaattataatataaaaaaccttattcttcccctttctatatttttaataggcttgcttgatttaatttggtattctgcgtttaaagtagataatagcccatttcgtgctacttaccatagttatttaaatactgccaaaatatttatatttggttcttttattgttttcttgacactaactagccagctaaaaagtaaaaaagagagtgtattatacactttgtattctctgagttttctaattgctggatatgcaatgtatattaatagcattcatgaaaatgaccgcatttcttttggtgtaggaacggcaacaggagcagcatatagtacaatgctaatagggatagttagtggcgttgcgattctttatactaagaaaaatcatccttttttatttttattaaatagttgcgcggtactttatgttctggcgctaacacaaaccagagcaaccctactcctgttccctataatttgtgttgctgcattaatagcttattataataaaagtcccaagaaattcacttcctctattgttctactaattgctatattagctagcattgttattatatttaataaaccaatacagaatcgctataatgaagcattaaatgacttaaacagttataccaatgctaatagtgttacttccctaggtgcaagactggcaatgtacgaaattggtttaaatatattcataaagagtccttttagttttagaagtgcagagagtcgcgctgaaagtatgaatttgttagttgcagaacacaataggctaagaggggcattggagttttctaacgtacatctacataatgagataattgaagcagggagtctgaaaggtctgatgggaattttttccacacttttcctctattttagtctattttatatagcatataaaaaacgagctttgggtttgttgatattaacgcttggcattgtggggattggactcagtgatgtgatcatatgggcacgcagcattccaattatcattatatccgctatagtcctcttactcgtcattaataatcgtaacaatacaattaattaagaataaacaagtttaagaagtgagttaaaactcacttcttatctatacaacttaatctctttacactattagttaaagtttcagtatcgatatcttttaccgtatatgttggggatactatttgtatagatttatgatgattcggggaccaaattaaatggctgggatattccggagtacgactattagggtaaaatgcaagcgttggtttatgataagccgcagcgatatgaacaagagctgtatcaacagaaatgacaaaatcactatacttggtcaacgcaacggtataaataaactcatcaaatggtagtgtttcgatttcaagtattggtattgtcaataaatcttgcggtaacccggtaaatataatccgataattttcaaagtgtgttttcacttcttgatatataacttttatttgctcaaacgtaagacggcatattttttttgcacctaatggattaataatgactattcttgtatctccaataaattcttttattttatcttcaacatctactggtaaatgcaagtcgtagttggtggaaaatttaccctcaccataaatatgcttcagtatttctattgctcgtgtactcatatgttcttttaaacattcatcgtggggatggtaaaaactatagtaacgcttataccaatgatcaaaacccagaatgtaagaatcttttaaactacttaatattaagctatgcttaaaactgggcatagtttcaaaggggtctaatacaatatcgaactgtaaatcccgcagatgcttacatagagtaagcatttcaagaaaaccggtactttctttaatacagaactcaaatatatttttattattagagagaaattccccaccctttctatttgtgagaagagttattttaacccctttactataaagttcacgataaatgctacttaatacaattagatcaccaagtttattattatcatgaataataaggcaacttttaacttgtgctggatctgtaatttgattatttattttattacgaaataaaaaagaaaggaaattaatcttgattttgtttatataaaatcttttctttttgtgaaaagttcctaagcgcatttttataccatattattttagtttcaggatgattaattagcataagaatcggtactagttctatattgcattttttttcttgtcatatctttactttcttctgcactgatgtcttgaagtttaataaatggaattacatcgtaagaaatagctgtatcatcacttaaattataaatattaatatcttttacattatcatgcataaaacgaaaaaatggcaatattttgaataaatccctacttaattcgctgggcatgggatttttattctcatcatagaaacgagaacagctacccgttaaatcaagaccagaacaaataatccgcgcatacttaagactatatgcgatttgaattgcagcaaaggcaatagtatggcaactgcaataaccaagactaatgtccttgcaaaatccaaccagacgaccttttttagacaacggtacagagatcagcagttctttgtgaatctgtctcaaaatattaaatttaatcttctttataaaaccacctttttcccgacggtaaaaggaccgtaatacgaggcagttctggaggatataaagtttatcttctttggaagcgtgttcataaacgtcaacgtttactatggtataacgacttctctggctaaatttataaaaatcatcacgacgctgatgtaaaaatcggacatctgtaagtacatatataaaaggaacgatattattacttaacagatattgcgcagaaccattgacagcaataatatcctttgttcgtaatacactcaaaggtgttttttggcttgtagggccgctaagaaaaataataacatcatcagatattttattttcaatcaggttttcaacatcttttttgtcaatgtatctaatattcttcatgataaacctgtgaaataaataactccgcttaaaactgtcctggtgaagacatgtaattgtgggattttttttagcgcgctggtttccctttcaaacgccgcataaaattgcgcatttttttacgatatactaaaagataatagcctagatctctaatctcatttttaataccgtaatgacgctctaagtcaatacgatctttcgctttacgctgcgcactagcacgctttccggagagatcgataattcgaacctcaccattttttataatgaagttaccacgatgggggtcgccagaaaccatgccatgttgatgtaaggcattaatactttgctgaattttattttttagcgcatcatcaatatcgggcatatcacacaactctatgccatcaatatactcgatgatcatgatataagtatggacaaaacgtaaggttttccgttcagccaataaataaaagtcattgagtgtatttaacccttcatttcgtactttttgggtttgctcaaaaaggcgttcgtaataatcaccttttaacagagacttaaagaaacgttcgttacgcttaactttcggagaaaaaaccttaagaatcaatttaccgtaatcggtatcaataagcataacttttgtatcatcaatagaacgaaaaaccttgatgatatttatattataagacaagaagtcatttaatacattgaggtacttactattgttttcatcggtaaaaacaaccaagtctttgatcttgctcttctgaatcataataaaccagttaaatgttatttacggtaatattttcggcaaagataacagactcctgctataattcctgagatataatgatgttgcactaaaagatgtttatatcttttttaaattcaataattgatttcgcatctcgtggagagtcatctttccagggggaattttctaaagctattttatagtattttaccgatggataaattgcccatttgtgccacggtttagttgcacctgtataatgaataagaagagtactttctgtaatcagctttttatagttttgatgtgttttgtcttttaattcacttttaattgtataaattgtattgtactcacgaggcaaaaataatgtcatccctttcagtaagacattcataacatcctgatcagggtatttataaacattatctttactcataagaatagacaacgctttttctgttagttttgcgtcagcccattttcttaagtctaaataaacgacaccggaattaaagtactgcccaagtaattcaggatcagacaacctggataccgccttttcttgcattggctcaacatctttaacaacagcagcaaccgctccatttaaacccagatgtaatagttggctaatatcgcctttacaaacaacatctgcatcaagataaagcaaacgatcaagcgttaaacccaataattgaaatgcaaataaacggaagtacattgctcttgaccagacctgtgtacaaggcaagcactggagcttatcagtgttaattctatataacgtgattcttaattggttttgctctgcaagctttgcaattttttgaaaaaaaccatcattataaacatcagcaataatataaaaatcaagattaatatgtcgattatttaggacaattgatgtgatggaaacacctacaccatcaagataattagcatcgacaccataggcaacatttaaacattcagaagtatttatattagctagccgaaaatcccaggctttaactttatctatctctatggcaggaaatgagtccacaatgctacccttatatcattactttatagtttcccagttttaatgctttatcttttcaataaaataaaaaagatagttgctaaatccttttagatatctatgctttttaagcatatgttttgcgctatatcttaattgattgctattgttcggtttcagcaacgccgtattcttccatgggctagcattttttgcctccataaaggcttgacttacaggataatcccaggcccaatcatgccagggcttggttggcccgatataatggataaaaatagtatcgttggttactgggtttataaagctttctttgagttgataatttaagctgaactgggtgttatatttaatatcagcgaaaataagtttatccgccagcaacatatttaacacatcctgatcaggatgtgttatttttttgattatttctggctcatttagcattgcaatagctcgtgcagaaacctgctgagccgcccattgggcagtattaatcaataaaaaaccggagttaaagtaacctttagcaattcccgcaacacctaagctatgggcgcgtttttcccaccagtcagcttgcccttctgtaacaaccattgcgactttatcgtcaggaaaactgaaattaattagtggctcaatagtcccctgacaaatgatatctgcatccagataaaggactttaggcgccttattaataaagtaatctgcaataacaaaacgaaaatatattgcatgagtccaattcttagtgctaggcaaactgcgcagtcgatcaccattaatcagatatattttaattctggttttatactgcaacgccagggcatcaaaatacttacgatcatcatcaccaaaataatcagtaaaaatatggaaacacaatcgacttccttcattatattttaatatactagcaatgctaattccgcaaccaaatagaaagtttttgtcagttccataagcgatgtccagacaaagattttctgtttctactttatgatcataatcaataacactattaagaaactcagtttcctggaaaaacacctgctgcattatttcctccgggaaatagcagaaataattaccttatgtaatctatcgtaatacttgctttggtaaaattcatcgatgctcgcaggaattttttcatgttcgatatgaatttcacctgctatatatttatttagaagagttacaaaaccagcaatatctcccggttgatacagatggccattgacatcaggttgaataatgtcagcaggcccggagacacaatcggcactgatacaaggaatcccccagctcaaggcttcaagtagggtcattgggaaaccttcaaaagaactcgtgagcaataacgcactcactttttcaatatcttgctggaccaattcccagggatattgttgccaaccataccagacaattcgatcatcaatatttaattctctaccataagcctggcatttttcgaaatcggagccatcacccaatacatggagtttccagttacctttcgcttgacttaagccatcaagcaggtctttaactcttttctggccttcaaatttcatacgcccaacataaataaacgttgccgtttcaccttcctcgggcgcgggaatgacactgtctttagtttcgacgggattaaaaataacatttatcgtgctttctgctacacctcgattaatcatttgctgtttaatgccagagctgattgctaaatgatagtcggcacaggtgatatattcagcatgttttttgtgatctaaagaaaaatgtggccaactaaatactggcatatcaattccactttttttacgtgcttttgcggcaaacaggcaggagatcacatcaatacaaataacgatatctggttggtactcctgaagccatttacttagagcatgaatatgtttcgcccgacgcaaaaaacctaaacgaatattggaaaaactacaactgtatttaataccttccagccatcccttatccattttgtcattacgacaaaagaaaaacatttcactttggatatgttgttgcctgaaggtagtaataacatcacggatgacagtttccatgccgccaaatccagaaacagcttcgccgataaacgctattttcatagaaactctcattaattgagtaaaactcactgttttaacggttttatttgtctataaaatcagaaacaatcgtactcatcattttatctggactgaatttatataaactatcataatccattggtttaacagaactgttaataaaatactctaacttatcccaatcatcatgacctattataaaaaagcgagattcactatagatttcactaccaaatacatttatattattagtaattaattttttattgaaaaatagtgcctcaagtatacgaagagtccagccagattggttttctttggttatatcaacaattatattagcatttaatgttcttctaatattctcttcataagatatttgtttttcaatcaaatacttactagtcgtagaacttgtcttatctttgacaacattaaaatctagcttacatcctagtgttgttaatctctcggctaactcattaattatttgaagacgccctttatcacgaccaaggaaaaaacatattggctggctgttatttttgtcagataaactataatttctaatttcatccattcctataggaaaaaattgttctattgccttgatcttttcattccctataaatctatgctcaaaatcatatataatatcgaaataattcgcgttatcaagaataaaatcttcgccaacagtatttcttagaagcaaaactttatgacagttaatattttttaatatttgtttattgatacctttattaacaacactgtcattaatgataattatgtcatcttttttaatatcattgaggtaatgcttgatgaataatcgccccagccatgcattatccatccctattttacttatttttttattaatccagttatatttttttggtgttgttatattttttatcttgtacttttttttcaggtactgaatcatttttaattcataatctgcaacccaatttataaaataaatagtcataataaagttagttccagtacatactaataaatatttttataatcctttgcgttgtgttcgctctttaatacgctcggccttaacgcttgccatgttcaataaattctgttcaagagacaatattttgcgtaaaggcatcccaaaataaaccttcataaatcgccagatatctctttgcgtcaggccaatattcatactactgaaatataaaccaatcaggtctttatcgcgccagcggcgcggtacttttgcacgtatctgtgcccgatgcagatcgataacactaatttttaattcatcttcccggccagtaaatggcaaatgaagcaaaaagtggcaaatgtaacagtcgcggtgatttatccctgcagtatgcattttacgcaccatagttgctacacgtgcgatcagcatacgcttaacacgtatatcaggcgggttgactgcccaatcggcacaataatcttcaaggctaattgtgggagtgagatcttcggtaataataaaacttgcgcgagttaatggatttaaccctttttcgccaaacccaatgcccttcattgtatcaacgccaacatcactcaggcgatgaatagcgtgccactctctgtctgcgcccaaaacgggcatccgcaaactgagtagattttttataatctcttttaatgtcgtccccttgtgccatttaagaaaatagcttttcccggacagttcaaagcgtaatgtacgacgagtctccagttcacgaaagacctcgccgttcagttttttgacctctgcaaaagcatctttaccacgccaaagtgtggcaagcggctcttttaattcaaccatctaaaccacctgtaatgatatccgcggctttttctggcaagctatacaaatcctgagtatcggcataatggcgagcattctccgcccaggccattcgcaatgggctctgagttaacgctttacgtaaaacttcatttaattgttcctgagagaaaggttcagcgatgaccgttccacaattggcatccgcaatataatgcgcgtacccacataccgctgttgttaaaacaggtaacccagcagtgatcgcttctagaagaacgatacccgcggcttcctgataagcgggatgcagtaataaatcagcggctgccattaattcactcacatcattgcgaccggagaagaaatgcacattgctccgcacgccgagtttttctgccagcgcttcaaattttcgcggcttatcctgaccaacaacaaataaaagcgtattgtgacgtaaactttccggtaagcttgccaaagcttcaatactgcgatctacacctttacggccaaaatcacttccaacctgcagtaataagttttgttgctcttttatgccatttttctggcgataaatttcacggctgtttgggatttgctcactgtattttctgtccggataaataccgggaggaagaatttgaaaacgttcaggttcagtttgataatgcttctggaaatcggcgatttgcttatcggtcagcatcataagtttcgtgcttttaccctgctcgaaagtcgctcgctcaaatgcggcataatggcgatatcgacttgttaaacgatataaaaaacctttttcttgcgcaactttctcggcgtaacaaacatcagcggcaaaataaacatccaggccaggcatcttattaaacccaacaacgcgatctgcgggatgctctttgagatgattttgtacccaggcataatattctgcattgcgtccatggttggtatgggacttaactggcacctgaataagctcaaatgctttcgggcaatcgccttcccagctctgtgtatatacccgaacatggtggccccgtgcggcaactgtacttgcaatgcgcataaagtcacgttgaagcccaccaaatggaaaatatttatataaacaaaacgccacgatcataattgtgcattcctgtcagcactaggggcatcttctggcaacagcttttccgtagcggcgatcacatcctccgctgggataacagaaagatattttttgttgcggtcaagttcatgccgggtcggcattttctgataattccccgcccagaattgaataatattctcggtccagggacgccagaatacgtgatccgttgcaccaaatagactaatgactggcgttttcactgccgctgcaatatgtcccggcgcagaatccacaccaataaaaagcactgcatgatcaattaatgcacccagttcaggaaaacgtgttttacctgcaaggccagtaatgggttttgtttcgcaacctcgtgcaatctcatctacacaagcgagatcatctgcgctgggcccacaggttagcacaacctgatagcctcgctgttgcagcgcatcgataaccttagaaaatttatcgttatcccaacacttaaatatctgacgcgctgtcggttggatgacaacataatgatcttttacgcccagggcatctaattcccggcgcatcttcttccagcaatcttcggcgtaactcattgttgtgtcggtgtagaaatcggtaatacctaatggctcaaggacgcttaaattacgctcaacaatatgtgtaccgtgtattggcgctaagtgtgtgaagctttttttccaaataccatgctgccgatgaccataaagttggcttattttcatccgtgcaggtaaacaacgtaccagcagcgccaccatccactgatccgtaagattaatgaccaggtcataattattcgcacgcagagtttttatcaagctaagcacatttttaattttatcgaaagttcccgcacctttattgcttatcccatagagcgcattaatttccgggttttcagacaaaatagggatggtgtcctgataaagcagcatatcgatttttgcatcaggataattctgcttgagcgtactgatgacaggagtagttaataacatatccccatgatatcgcatctttatgaccaggatttttcgaaatggcttttccactagcgactcttttgtgtgattgtctggttaagttaagcagaaaaaagcacgctaccgccccaggctcaacagctacctgaatactgataacgcacttactttgacgtgctagtgtatcatttctttcgcagcaatccgacccgaatgatttttatacacaaaatatactttaatcataaaaatcaaatagataaaaaatagcatttcgataatgtcagtacggcctatgtagatttgaaaatggggccgagtttcaatgaatcgcataaaaatacaaaaaaaatgaagatgtagcggcagatcagaccaaactgaagctatttaagtcaaaaacgggaaaagtaatggtaaagccacagctaaatacatagaatccccagcacatccataagtcagctatttactatgctcgaattgctttacaccgcccttctctaccttattcagccgctgatctggatacggctctgggtgcgcggacgtaaggctccggcctatcgaaaacgctggggtgaacgttacggtttttaccgccatccgctaaaaccaggcggcattatgctgcactccgtctccgtcggtgaaactctggcggcaatcccgttggtgcgcgcgctgcgtcatcgttatcctgatttaccgattaccgtaacaaccatgacgccaaccggtagcgagcgcgtacaaagcgctttcgggaaggatgttcagcacgtttatctgccgtatgatctgcccgatgcactcaaccgtttcctgaataaagtcgaccctaaactggtgttgattatggaaaccgaactatggcctaacctgattgcggcgctacataaacgtaaaattccgctggtgatcgctaacgcgcgactctctgcccgcagcgccgcaggttatgccaaactgggtaaattcgtccgtcgcttgctgcgtcgtattacgctgattgctgcgcaaaatgaagaagatggtgcacgttttgtggcgctgggcgcaaaaaataatcaggtgaccgttaccggtagcctgaaattcgatatttctgtaacgccgcagttggctgctaaagccgtgacgctgcgccgccagtgggcaccacaccgcccggtatggattgccaccagcactcacgaaggcgaagagagtgtggtgatcgccgcacatcaggcattgttacagcaattcccgaatttattgctcatcctggtaccccgtcatccggaacgcttcccggatgcgattaaccttgtccgccaggctggactaagctatatcacacgctctagtggggaagtcccctccaccagcacgcaggttgtggttggcgatacgatgggcgagttgatgttactgtatggcattgccgatctcgcctttgttggcggtagtctggttgaacgtggtgggcataatccgctggaagctgccgcacacgctattccggtattgatggggccgcatacttttaactttaaagacatttgcgcgcggctggagcaggcaagcgggctgattaccgttaccgatgccactacgcttgcaaaagaggtttcctctttactcaccgacgccgattaccgtagtttctatggccgtcatgccgttgaagtactgtatcaaaaccagggcgcgctacagcgtctgcttcaactgctggaaccttacctgccaccgaaaacgcattgaggttgttatgcaaaaacgggcgatttatccgggtactttcgatcccattaccaatggtcatatcgatatcgtgacgcgcgccacgcagatgttcgatcacgttattctggcgattgccgccagccccagtaaaaaaccgatgtttaccctggaagagcgtgtggcactggcacagcaggcaaccgcgcatctggggaacgtggaagtggtcgggtttagtgatttaatggcgaacttcgcccgtaatcaacacgctacggtgctgattcgtggcctgcgtgcggtggcagattttgaatatgaaatgcagctggcgcatatgaatcgccacttaatgccggaactggaaagtgtgtttctgatgccgagcaaagagtggagctttatctctagtagcttggtgaaagaggtggcgcgccatcagggcgatgtcacccatttcctgccggagaatgtccatcaggcgctgatggcgaagttagcgtaacgtttatgccggatggtatgccatccggcgcgcatgaattacttctggcactgccgacaataaaacgttgcccgctgcgcatgtttagtcgccacaatcggcgtaccgcacacccgacacggctcaccttttcgcccgtaaacctgcaattcctgagcgaaatagcccggtttaccatcactttgcagaaaatctttcagcgttgtaccaccctgctcaatgctacgcagcaacaccgctttaatcacccgagctaacaattcacactctgccaggctcagactactcgccagccgatccggatggatccccgccgcaaacagactttcgctggcatagatattccctacccctaccaccagcttgttatccatcagccacggtttaatcgccgtttttttcttcgcgcacttctgatgcagatactcaccattgaaatcgtcgctaagcggctccggtccaagatgggtcagcacattatgcccttccagctctttggtccacagccaggcaccaaagcggcgcggatcggtgtagcgcagcactttgccgttgctcatcaccaaatccacatggtcatgcttttcagggggaagttcttctggaaggatgcgcaggctgccagacatccctaaatgaatgataatccagccctcaggcagctccagcagcagatatttagcccgccgctgcacgctaagcactggttggtcgcttaaacggtagatctcttcactaaccggccagcgcaagcgtccgttgcgcaccactgcatgaagaatggttgcaccaacgagatgcggttctatgccgcggcggctggtttcaacttcgggtaattcaggcatagcatctccaggaatgaacagatgcagtcaatatgggggcaagcagataacaaaaaaccccgccggagcgaggttttttgttacatcaaagcgagaattatttgattttcgcttctttgtagatcacgtgctggcgaacaactggatcgaattttttcagttccagtttttccggcttagtacgtttgttcttcgtagtggtatagaagtgaccagtaccagcagaagaaaccagcttgattttctcacgaatacctttagccatgatttatttcctctaagtacttagtacttttcgccacgggcacgcagttcagccagaactgtatcgatgccttttttatcgattacacgcatacctttagcagatacgcgcagggtgacaaaacgcttctcgctctcaacccagaaacggtgagagtgcaggttcggcaggaaacggcgtttagtcgcgttcagtgcgtgggaacggttgttaccggtcaccggacgcttgccagtaacttggcagactcgggacatgtctattctccaaaaatcaaattagctcgagcttcgtatggggtattggcgcctcgtcaggctttacagcccggtcatcgcagttctatgtgaactctcgattgccaggcccaaatgccaaacccgagattctcaaaggtggcgtagtatacgctgactcagcgatgtgctcaagtcccgaacagacaaagatcccgaaggatcgcgcatagcgggttaaatccagccgcgttcggcaaaagaaacatactctccacgcccaatcacgatatggtcgagcacgcgtaaatccatgaactgacaactctttattatccgttcagtaatgagtttatccgctttactgggttcagcacaaccgctagggtgattatgtgcaaggatcagcgcgctggcgtttatttttatcgcttcgcggataatttcccgaggatggacttcaacatggtttagcgtgccggaaaaaagacgcctatgcgttataacccggtgttgggagtcgagaaagatcaccataaagatctcccgctcctcacccgtgagctggctttgtaaaaattccctcgtcatctccgggctgagtaaagggctttcttcacgcatccgcacgttgtagtaacgccgcgccagttcagcaatcccctttaactgggcaaatttcgccacgccaattccatgaacgccactaaattgttcatattcagaggttaacaagccataaagagagccgaaattctccagcatctcttttgccagggttaatacatctttaccgcgcgttccggtacgcagaaatagcgccagcagctcgacatccgttaaggcgctaataccaaacttcagcattttttcgcgcggcatcaacagctgactattgtttttcaccttcacctcctttgtggtgctcgcatcctgtcatagccgtttcgttaaatcgacggccagttttcaatcctggaaagcgcctcgcaaagtgaatctcaggtgaaggcacgacaacaaaagtattgtgataaaatcgccaacttctggtgtcaccctacaggaaaaatcatcatgagcctggccggtaaaaaaatcgttctcggcgttagcggcggtattgctgcctataaaacccctgaactggtgcgtcgtttgcgcgatcgcggggccgacgtccgcgtagccatgaccgaagcggcaaaagcctttatcaccccacttagcttgcaggcggtttctggttatcccgtttccgacagtctgctggacccggcagccgaagccgctatgggccatattgagctgggtaaatgggctgatttagtgattctcgcccctgccacggcagatttgattgcccgtgttgctgccggaatggcgaatgacctggtaagcacgatttgtctggctacacctgcgcctgtagccgtgctccccgccatgaaccagcagatgtaccgtgccgctgccacgcagcataatttagaggtgcttgcttcccgtggtttgctcatctgggggccagacagtggcagtcaggcttgtggtgatatcggtcctgggcgaatgctcgatccgttaaccattgtggatatggcggtagcgcattttagccccgtcaacgacctgaaacatctgaacattatgattaccgccggcccgacgcgtgaaccgctcgatccggtgcgttatatctctaatcacagctccggcaagatgggttttgctatcgccgccgccgctgcccgtcgtggcgcgaacgtcacgctggtaagtggtccggttagtctaccgacgccaccgtttgttaaacgtgttgatgtgatgaccgcgctggaaatggaagccgccgtgaatgcttctgtacagcagcaaaatatttttatcggctgcgccgccgtggcggattatcgcgcagctaccgtggccccagagaaaatcaaaaagcaggccacgcagggtgatgaattaacaataaaaatggttaaaaaccccgatatcgtcgcaggcgttgccgcactaaaagaccatcgaccctacgtcgttggatttgccgccgaaacaaataatgtggaagaatacgcccggcaaaaacgtatccgtaaaaaccttgatctgatctgcgcgaacgatgtttcccagccaactcaaggatttaacagcgacaacaacgcattacaccttttctggcaggacggagataaagtcttaccgcttgagcgcaaagagctccttggccaattattactcgacgagatcgtgacccgttatgatgaaaaaaatcgacgttaagattctggacccgcgcgttgggaaggaatttccgctcccgacttatgccacctctggctctgccggacttgacctgcgtgcctgtctcaacgacgccgtagaactggctccgggtgacactacgctggttccgaccgggctggcgattcatattgccgatcctagtctggcggcaatgatgctgccgcgctccggattgggacataagcacggtatcgtgcttggtaacctggtaggattgatcgattctgactatcagggccagttgatgatttccgtgtggaaccgtggtcaggacagcttcaccattcaacctggcgaacgcatcgcccagatgatttttgttccggtagtacaggctgaatttaatctggtggaagatttcgacgccaccgaccgcggtgaaggcggctttggtcactctggtcgtcagtaacacatacgcatccgaataacgtcataacatagccgcaaacatttcgtttgcggtcatagcgtgggtgccgcctggcaagtgcttattttcaggggtattttgtaacatggcagaaaaacaaactgcgaaaaggaaccgtcgcgaggaaatacttcagtctctggcgctgatgctggaatccagcgatggaagccaacgtatcacgacggcaaaactggccgcctctgtcggcgtttccgaagcggcactgtatcgccacttccccagtaagacccgcatgttcgatagcctgattgagtttatcgaagatagcctgattactcgcatcaacctgattctgaaagatgagaaagacaccacagcgcgcctgcgtctgattgtgttgctgcttctcggttttggtgagcgtaatcctggcctgacccgcatcctcactggtcatgcgctaatgtttgaacaggatcgcctgcaagggcgcatcaaccagctgttcgagcgtattgaagcgcagctgcgccaggtattgcgtgaaaagagaatgcgtgagggtgaaggttacaccaccgatgaaaccctgctggcaagccagatcctggccttctgtgaaggtatgctgagtcgttttgtccgcagcgaatttaaataccgcccgacggatgattttgacgcccgctggccgctaattgcggcacagttgcagtaatatgacgccggatgacttttcatccggcgagtttctttaaacgccaaactcttcgcgataggccttaaccgccgccagatgttccgccatttccggcttctcttccaggtaagcaatcaggtctttcagggtgatgatagagatcactttgcagttgtaatcacgctcaacttcctgaatcgcgctaatctcgccgcgcccgcgttcctgacgatcgaggctaatcaacacgccagcaagcgtcgcgccattggcctgaataatctccatgctctcgcgaatcgccgttccggcggtgatcacatcatctaccagcattacgcgtccttgtaacgcgctaccaaccagattgccgccttcaccgtggtcttttgcttctttgcggttaaagcagtacggcaggtccaggtcgtgatgctccgccagtgccacagcggttgtggtggcaatcgggatccctttgtaagcagggccaaacagcagatcgaactcaatgccggaatccaccaacgcttcagcgtaaaaacggcctaacagtgccagatcgcgcccggtattaaacagcccggcgttgaagaaataggggcttttgcgcccggatttcagcgtaaactcgccaaactttaacacctgcttgctaagcgcaaattcaataaactggcgctgatatggtttcatgccttcgctcctcatcttacttttctacagacaaaaaaaaggcgactcatcagtcgccttaaaaatcagtttgccagcgccgccttctgcgtcgttacaatggattgctttcccctcgggccagagccaacaagatgagtagctcttcatgggtgaacggctcgccttctgccgtcccctgcacttcaatgatgcgcccgtcttcggtcatcactacgttcatgtcggtctctgcggcagagtcttcaacgtattccagatcgcaaaccgcttcgccgttcacaattccgacagaaactgcggctaccatccctttcatcggattggttttcagcttgccgttttccaccagcttctgtagcgcatctaccagcgccacgcaggcacccgtaatgctcgcggtacgcgtgccaccatcagcctgaagcacgtcgcagtccagcgtaatggtgaactcacccagcgctttcaaatctactgccgcgcgaagagcacgggcgatcagacgctggatttccattgtgcgtccaccctgcttacctttcgccgcttcacgagcgttacgggtgtgggtagaacgtggcagcatgccgtactctgcggtgatccagccctggccctgacctttcaggaagcgcggcacgccttcttcaatagaggcggtacacaacactttggtatcgccaaattcgaccagcacgctgccttctgcatgttttgtatagttacgagtcagggtaacgggacgcacctgattattgctacggcctgctggacgcatattgaaatctccggcttgaaacaaatgtggctgcgcattatacggacttccggcggttattcctatcctgacaaggcatcgatggctataatccttccacctctccttttataaacaggaacgtctatgatccgcagtatgaccgcctacgcccggcgtgaaatcaagggtgaatgggggagcgcaacctgggaaatgcgcagcgtaaaccagcgttatctggaaacttactttcgtctgccggagcagttccgtagccttgaacctgtcgttcgcgagcgtattcgttctcgcctgacgcgcggtaaagtggaatgtaccctgcgctatgagccagatgttagcgcgcaaggtgagctgatcctcaacgaaaaactggctaaacagctggtaactgccgcgaactgggtaaaaatgcagagtgacgaaggggaaatcaacccggttgatattctacgctggccgggcgtgatggcagcccaggagcaggatcttgacgccattgccgctgaaattctcgcggcgctggatggtacgctggacgactttattgtcgcgcgcgaaaccgaaggtcaggcactgaaagcattgatcgagcagcgtctggaaggcgtcaccgccgaagtggtcaaagtccgctcccatatgccggaaatcctgcaatggcagcgtgagcgtctggtcgcgaagctggaagatgctcaggtgcaactggaaaacaaccgtctggagcaggaactggttctgctggcacaacgaattgacgttgccgaagaactggatcgcctcgaagcgcatgtcaaagagacctacaacattctgaagaaaaaagaagcggttggtcgtcgtctggattttatgatgcaggagttcaaccgcgagagcaacactcttgcgagcaagtctatcaatgccgaagtgacaaactccgccatcgagctgaaagtgttgattgagcagatgcgcgagcagattcagaacatcgaataactcgtaacgccaattcttacttttccgccttcacaaatgccgccactcaaacagagcggcatttttcttccccgcaacattcaattctgttttgcgtgcctgctccagattttgcgatgtttttttgcccagcacactgagaacgtgagatactcacaactgtatataaatacagttacagatttactttctttgcaattgatatcacatggagtgggcaatgaacgaacatcatcaaccttttgaagagataaaactgattaatgcaaacggagcagaacaatggagtgcaagacaacttgggaaactactgggttatagtgagtatcgtcactttatacctgtattaacgcgcgccaaagaagcctgtgagaacagtggtcacacaattgatgaccatttcgaggagatcctcgatatggtcaaaattggcagtaatgccaaaagagcattaaaagacatcgtactctcccgctatgcctgttacctggtagtacaaaacggcgaccctgcgaaaccggtcattgcggcagggcagacttattttgctatccagacccgacggcaggagcttgctgacgatgaagcatttaagcaacttcgtgaagacgaaaagcgtctgtttctgagaaatgagttgaaagaacataacaaacaattggttgaggcagcacagcaagctggggtagcgacagctactgatttcgccatatttcagaatcatggttaccaggggctgtatggtggattagatcagaaagctattcatcagcggaaggggctgaaaaagaatcagaagatcctggatcatatgggtagtacagaactggcggctaatctctttcgagctacccaaacagaagaaaaactcaagcgggatggcgtgaatagtaaacagcaagcaaacaccacacactttgacgtgggtcgcaaggtgaggcaaaccattcaggaacttggcggaaccatgcctgaggagttgccgaccccgcaggtcagcatcaagcagttggaaaacagtgtaaaaattacagagaagaaataacagaaactaaaaactctttttgttgattgagacacccgatgcgtaagccaaggtccaggtgcagtgaacacaatggctaaatattgcacctttcttttccccctcagttttaacctattttttcttatgcattttctcagacaagaagtcagaagaatgcatctctgctacagaaaatagcgatttcacataactacaagttatcaatttcccctccccttaaaaaatctcaatcgtgacaatgcgcacaaatcgctaccctgccagacagatttttagggagagaaccatgctgttacacattttgtatttggttggcattactgccgaagccatgacgggggcgctggcggccggacgacggcgcatggatacatttggcgtaattattattgcgaccgccaccgcaattggcggagggagtgtgcgcgatattctgctgggccactatccgctcggctgggtcaaacacccggaatatgtgattatcgtcgctaccgccgcagtactcaccactatcgttgctcctgtaatgccttacctgcgcaaagtgtttctggtgctcgatgcgctcggactggtggtcttttctatcatcggggcacaggttgcactggatatggggcacggcccaattattgccgttgtcgcggcggtaaccaccggcgtgtttggcggcgttttgcgcgatatgttctgtaaacgtatcccactggtattccagaaagagttgtatgccggtgtcagttttgcctccgccgtgctgtacatcgcgctgcaacactatgtttctaaccatgatgtggtaattatctccaccctggtattcggcttttttgcccgcttactggcgctacgccttaagctgggattaccggtcttttactacagccacgaaggacattaaggttcaaaacctgtgatctgctgggcagccagccaactgcccagcttcttgatttgcgcattttccttccattcaataacctgtctggcgcgtccgcttccagtccccggcagctgctgccagaactgctccgtgctaaataaaagttggctccaggaccgttcatcactggcattaagcgccgcccgggttagcggtattcccattgccatcacccagcgagtaaaaggctgcttacgagccagattaaactgatgccatagctgcgcacttttacttttcgcgatccccggcgtgttctgtaattgctctggcgttaataaaagccaggaaaagatatgttcaaagcgatgagtctgatgcagcgcgcgccaaccggcctcaccaatgccatccagcccaagaacctgttttgcccccagccagactaagcgactaatgaactgttcctgacaaacatcagaagcaaagtagcaggtcaagctgttaaagcggttttctggcggtgtcggttttgtacgttctgcaccgcgccacaccacatcatcaatgcgaggaataccctgaccggcaaggctgacgagaatctgatcaccaggcgcaatatcccactcctgccagcgcctgacggaaccaatattcacccgctggacttttttatcatccagcatgacaggtgcgagactcgcaaccacgcttattttaccgctcttacccaccgcaaactgaattgccttcacttcggcaacctgagctacaggttgatatttccaggccaccagccactctgcctggcccggtagccaatggcgggattctggctctttcgccgctcgtacaactacgccatcggtgacgaagggtaattccgctttccaccactcattgcgtacgcgcgcaacttcatcagcatttttcaccgcacgggtatacgtctgcgttagagtaaaacctgcggtagccagctcttttaaacgatcagacattaactgcggtccatccggccatgcccagacaaaaacgcccagagaattcagcgtgtcgctatcgtcctggcgcatcatcaagccagcaacttttgcgcgggcatttattccccccatttgttgttggatatgcccctcgcgctggagaaatatttccccctgaagcgtactgttggctaaaggcccgctaacggtttgcggcacagcggaaattaagctaactttctgcgtccagtcctcgcctttcaggccattaccgcgactgattgctttgttcagtttcccgtcccgataaaccagggttaccgcaacgccatcaacttttggctgcacccaaagatcgctacgttctcgcatccacagacttaatgcgtttttatccaccattttgcgtacacccgtatgggcaaccggatgcataaccgcaccatttaaaggcggcatcatcacgtcgcggggctcgctcccaaagcagcgttgccactgcgtaagacgggcgcttaactgatcgtaaacaccgtcttccacctcactttttccttccttccagtagtcatcgtcccactgttttatttgctgttgcaggcgggaaatttcttcctgtgctctggctgggctccaggccggacagaccgcccacacagaactttgccagcacaagatacctattaatatcgccatccatactttcatcatcacctccgctgtagatagtcaggcagatatacaacgtgatgaaagcaaagccgagtggcaaaaacggagtctgcgaggacgcttcctgaaaatcgtctttattgcagtgaatgacaggcaaatgcggaagcagctacgcaaaacgcaacaactttgcgcaaaaagtgtgagcaagggctacgtcacatggccgcgccgtgtataataagctcgtatgtaggctttatttcgctaatcacatacgaaagatactcatggctcaaggcacgctttatattgtttccgcccccagtggcgcgggtaaatccagcctgattcaggctttattaaaaacccaaccgttgtgtgacacccaggtttctgttagtcacaccacacgccaaccgcgtcctggtgaagtccacggtgaacattatttctttgttaatcatgatgaatttaaagaaatgattagcagagatgcgttcctcgaacacgcagaagtttttggtaattactatggcactagccgtgaggccattgagcaagtactggcgaccggtgtcgatgtttttctcgatatcgactggcagggcgcgcagcaaattcgccagaagatgccgcacgcgcggagtatctttattttaccgccgtccaaaattgaactggaccgccgtctacgcggtcgcggtcaggacagcgaagaggtcattgcaaagcgtatggcgcaagctgttgcagaaatgagccattacgccgaatatgattatctgattgtgaatgatgacttcgataccgcgttgaccgatttgaagaccattattcgcgccgaacgtctgcgcatgagccgccaaaagcagcgtcatgacgctttaatcagcaaattgttggcagactgaacctgatttcagtatcatgcccagtcatttcttcacctgtggagctttttaagtatggcacgcgtaactgttcaggacgctgtagagaaaattggtaaccgttttgacctggtactggtcgccgcgcgtcgcgctcgtcagatgcaggtaggcggaaaggatccgctggtaccggaagaaaacgataaaaccactgtaatcgcgctgcgcgaaatcgaagaaggtctgatcaacaaccagatcctcgacgttcgcgaacgccaggaacagcaagagcaggaagccgctgaattacaagccgttaccgctattgctgaaggtcgtcgttaatcacaaagcgggtcgcccttgtatctgtttgaaagcctgaatcaactgattcaaacctacctgccggaagaccaaatcaagcgtctgcggcaggcgtatctcgttgcacgtgatgctcacgaggggcaaacacgtagtagcggtgaaccctatatcacgcacccggtagcggttgcctgcattctggccgagatgaaactcgactatgaaacgctgatggcggcgctgctgcatgacgtgattgaagatactcccgccacctaccaggatatggaacagctttttggtaaaagcgtcgccgagctggtagagggggtgagcaaacttgataaactcaagttccgcgataagaaagaggcgcaggccgaaaactttcgcaagatgattatggcgatggtgcaggatatccgcgtcatcctcatcaaacttgccgaccgtacccacaacatgcgcacgctgggcagtcttcgcccggacaaacgtcgccgcatcgcccgtgaaactctcgaaatttatagcccgctggcgcaccgtttaggtatccaccacattaaaaccgaactcgaagagctgggttttgaggcgctgtatcccaaccgttatcgcgtaatcaaagaagtggtgaaagccgcgcgcggcaaccgtaaagagatgatccagaagattctttctgaaatcgaagggcgtttgcaggaagcgggaataccgtgccgcgtcagtggtcgcgagaagcatctttatagcatttactgcaaaatggtgctcaaagagcagcgttttcacagcatcatggacatctacgctttccgcgtgatcgtcaatgattctgacacctgttatcgcgtgctgggccagatgcacagcctgtacaagccgcgtccgggccgcgtgaaagactatatcgccattccaaaagcgaacggctatcagtctttgcacaccagcatgatcggcccgcacggtgtgccggttgaggtccagatccgtaccgaagatatggaccagatggcggagatgggtgttgccgcgcactgggcttataaagagcacggcgaaaccagtactaccgcacaaatccgcgcccagcgctggatgcaaagcctgctggagctgcaacagagcgccggtagtagctttgaatttatcgagagcgttaaatccgatctcttcccggatgagatttacgttttcacaccggaagggcgcattgtcgagctgcctgccggtgcaacgcccgtcgacttcgcttatgcagtgcataccgatatcggtcatgcctgcgtgggcgcacgcgttgaccgccagccttacccgctgagccagccgcttaccagcggtcaaaccgttgaaatcattaccgctccgggcgctcgcccgaatgccgcttggctgaactttgtcgttagcagcaaagcgcgcgccaaaattcgtcagttgctgaaaaacctcaagcgtgatgattctgtaagcctgggccgtcgtctgctcaaccatgctttgggtggtagccgtaagctgaatgaaatcccgcaggaaaatattcagcgcgagctggatcgcatgaagctggcaacgcttgacgatctgctggcagaaatcggacttggtaacgcaatgagcgtggtggtcgcgaaaaatctgcaacatggggacgcctccattccaccggcaacccaaagccacggacatctgcccattaaaggtgccgatggcgtgctgatcacctttgcgaaatgctgccgccctattcctggcgacccgattatcgcccacgtcagccccggtaaaggtctggtgatccaccatgaatcctgccgtaatatccgtggctaccagaaagagccagagaagtttatggctgtggaatgggataaagagacggcgcaggagttcatcaccgaaatcaaggtggagatgttcaatcatcagggtgcgctggcaaacctgacggcggcaattaacaccacgactagcaatattcaaagtttgaatacggaagagaaagatggtcgcgtctacagcgcctttattcgtctgaccgctcgtgaccgtgtgcatctggcgaatatcatgcgcaaaatccgcgtgatgccagacgtgattaaagtcacccgaaaccgaaattaatgttttatgaacccaacacgttatgcacgcatctgcgaaatgctcgccaggcggcagcctgatctgaccgtctgcatggagcaggtccacaaacctcataacgtttctgcgattattcgtaccgcagatgccgttggcgtacatgaagttcacgccgtctggcctggtagccgcatgcgcaccatggctagcgcagcggcgggtagtaacagctgggtacaggtgaaaacacaccgcaccattggcgatgccgtcgctcatctcaaaggccagggcatgcagattctggcaacccatctttctgataacgctgtcgatttccgcgaaattgattacactcgcccgacctgcattttgatgggacaggagaaaacgggcatcacgcaggaagcattggccctggcggatcaggacatcatcattccgatgatcggcatggtgcagagcctgaatgtttccgttgccagtgccctcattctttacgaagcccagcgtcagcggcaaaatgcaggcatgtacctgcgtgaaaacagcatgttgccggaagcagagcaacaacgcctgttgtttgaaggcggctatccggtgctggcgaaagtcgcaaaacgcaaaggcctgccttatccccacgtcaatcagcaaggcgagatcgaagctgatgccgactggtgggctactatgcaggctgcagggtaagtgccatgaaaggtcgcctgttagatgctgtcccactcagttccctaacgggcgttggcgcagcacttagtaacaaactggcgaaaatcaacctgcataccgtgcaggatctactcttacaccttcccctgcgctacgaagatcgcacccatctctaccccatcggagaactactgccgggcgtttatgccacggtggaaggcgaagtgctgaactgcaatatctccttcggcggtcggcggatgatgacctgccagatcagcgacggttccggcatcctcaccatgcgctttttcaatttcagcgcggcaatgaaaaatagcctggcggcgggccgccgtgtactggcttatggcgaagcaaagcgcggtaaatatggtgcggagatgatccacccggaataccgcgtgcagggcgatctcagcacgccagaattacaggaaacgctcacgccggtttatccaacaacggaaggcgtaaagcaggccacgctgcgtaaattaaccgaccaggcgctggatctgctcgacacctgcgccattgaagaactcctgccgccggaactgagtcaaggaatgatgacgctaccggaagcgttgcgcactttgcaccgcccgccaccgacgctacagcttagcgatctggaaaccgggcagcatccggcgcaacgtcgtctgattctggaagaactgctggcgcacaacctcagcatgttagccttacgtgccggagcacagcgttttcatgcccagccgctgagcgccaatgacacgctgaaaaataaactcctcgccgccttaccgttcaagccaacgggcgcacaggcacgcgtagtggcggagatcgagcgcgatatggcgctggatgtgccgatgatgcgtctggtgcagggcgatgtaggttccggtaaaacgctggtcgccgccctcgccgcgttgcgtgcgattgcccacggcaaacaggtagcattgatggcaccaaccgaattactcgccgagcagcacgccaataacttccgcaactggtttgcaccgctcggtatcgaagtgggctggctcgccggtaagcagaaaggtaaagcacggctggcacagcaggaagccatcgccagcggtcaggtgcagatgattgtcggtacacacgccatcttccaggaacaggtgcagtttaacggcctggcgctggtgattatcgacgaacagcatcgttttggcgtgcatcagcgtctggcattgtgggagaaaggccagcagcagggcttccatccgcatcagttgatcatgaccgccacgccgatcccccgcacgctggcaatgactgcgtatgccgatctcgataccagcgtgatagatgagctgccgccaggccgcacgccagtgactacggtcgctattcctgatacccgccgtaccgacatcattgaccgcgtgcaccacgcctgcataactgaaggtcgtcaggcatactgggtttgtacgttgattgaagagagcgaattgctggaagcgcaggcggcggaagctacctgggaagagttgaaactggcgctaccagagttgaacgttggcctggtacacgggcggatgaaacctgccgagaaacaggcggtgatggcgagctttaaacaaggtgagctacacctgctggttgccacaaccgttattgaagtcggcgttgatgtgcctaacgccagtctgatgattatcgaaaacccggagcgtctgggtctggcgcagttacaccagctgcgcgggcgcgtaggtcgtggcgcggtggcttctcactgcgtgctgctctacaaaacgccgctttctaaaacggcgcaaattcgcctgcaagtgctgcgcgacagtaacgacggttttgtgattgcgcaaaaagatctggagattcgcggccctggcgaattgttaggcacgcgtcagacgggtaatgctgaatttaaagtggcggatttactgcgcgatcaggcgatgatcccggaagttcagcgcctggcacgccatattcacgaacgttacccacaacaggcaaaagccctgatagaacgctggatgccggagacggaacgttacagcaatgcgtaaaaggcggcagtgagaagaccgccatttcaggttaccctaccttcctgccggatgcgattcatcaccctacaaattcaataaattatgaatcaatacgcaggcttgataagcgaagcgtatcaggcatttgtctttgttgcggcggcacttctaccgccgcttcatcggttaaccggcaaaaatcggcaacatcaaatacaacttaattaccagcgcattgacgatatcgataaagaacgcaccgaccatcggcaccaccaaaaacgccatgtggcccgggccaaagcgttcagtgatcgcctgcatgttggcgattgccgttggcgttgcaccgaggccaaaaccacagtgacccgcagccagcactgccgcatcgtagtttttgcccatcatgcgccaggtaacgaagatggcatacaacgccatgaagatggtctgtaccaccagaatcgccagcatcggcagcgccaggctagccagctcccacagtttcagccccatcaacgccatcgccaggaacaagctcaagcttacgttacccagcacggataccgcacgctcaaagacgcggtaaaagcccattatactcagaccgttgctcagaatcacgccaacaaacagtacacagacgaaggtcggcagttcaaaagcagtgccagccaaaagttgcgcaacaattttccccaccgtcaggcagatagcaatcagcgcgatagtttcaatcagcaccaagctggtgatcatgcgtcccacatccggcttttcaaacgccgtcgggacttcctggtcatccggaataccgttcggcgtggtggagtgtttcaccagatagcgcgccaccggaccgccaatcaagccgcccagcaccagaccgaacgttgcacaggccatcgccacttccgtcgcattggtgaagccataacgttcaatgaacaatttactccacgcagcgcccgtaccgtgaccgccggaaagagtaatagaaccggccaacagccccatcagcggatcaagccctaacaagctagccataccaatgccaatggcattttgcatcaccaacagaccaacaaccacaatcaagaagatgccaaccacacgcccaccggcacgcaaactggcaatgttggcgttcaggccaatggtggcgaagaaagccagcattaacggatcgcgcagggacatatcaaagttgacttcccagcccatgctttttttcagtactagtagcgccagcgccaccaacaaaccacccgcaacaggttccggtatggtgtatttcttcaaaaaggagacggaatggaccaacttacgcccgagcagcaacgtcagcgttgcggcaacaagcgttgctaaagtatcgagatgaaacatagttactcctttgtatccgcatcactctttcatactcgtcatacttcatcgcgcagtggcaacttcatgaactatgacgggtatcgagttatgctttcctgggtcaaattctcagctgttaatgaacaaatggcatggattttaagcagaaaaataccaaaagttatataaaaaagtgcatttatctcatttaaatatttagatgaggatgtggcaaacgtttgcttttctctttcggtcagctaaaatgcccgctttgctaccacgggattgttttcgatgtctgtttccaccctcgagagtgaaaatgcgcaaccggttgcgcagactcaaaacagcgaactgatttaccgtcttgaagatcgtccgccgcttcctcaaaccctgtttgccgcctgtcagcatctgctggcgatgttcgttgcggtgatcacgccagcgctattaatctgccaggcgctgggtttaccggcacaagacacgcaacacattattagtatgagcctgtttgcctccggtgtggcaagcattattcaaattaaggcctggggtccggttggctccgggctgttgtctattcagggcaccagcttcaactttgttgccccgctgattatgggcggtaccgcgctgaaaaccggtggtgctgatgttcctaccatgatggcggctttgttcggcacgttgatgctggcaagttgcaccgagatggtgatctcccgcgttctgcatctggcgcgccgcattattacgccgctggtttctggcgttgtggtgatgattatcggcctgagcctaattcaggttgggttaacgtccattggcggcggttacgcagccatgagcgataacaccttcggcgcaccgaaaaatctgctgctggcaggcgtggtcttagccttaattatcctgcttaaccgtcaacgtaacccttacttacgcgtggccagtctggtaattgcgatggcggccggatatgcgctggcgtggtttatgggcatgttgccagaaagcaacgaacctatgacgcaagaactgattatggtgccaacgccgctctattacggtcttggcattgaatggagtctgctgctgccgctgatgctggtctttatgatcactagcctggaaaccattggcgatatcacggcgacctctgacgtttccgaacagccagtgtccggtccgctgtacatgaaacgcctgaaaggcggcgtgctggcaaacggcctgaacagctttgttagcgcggtgtttaacaccttcccgaactcctgcttcgggcaaaacaacggagtgatccagttgactggtgttgccagccgctatgtcggttttgtcgtcgcgctgatgttgatcgtgctgggtctgttcccggcagtgagcggttttgtacaacacattccagaaccggttctgggcggcgcaacgcttgtaatgtttggcaccatcgccgcctccggtgtgcgtatcgtttctcgtgagccgctgaaccgtcgggcgattctgattatcgcgctgagcctggcggttggtctgggcgtgtctcagcagccgctgattttgcagtttgcccctgaatggctgaaaaacctgctctcctccgggatcgccgcgggcggtattactgccatcgtgctgaatctgattttcccaccagaaaaacagtaattcactggcggcggtaagataattaccgccgcagtctcacctctttaaccattcccgccttgaggattgcgcgtaaatcgtgcataactcccttatgtgcatttcacgggatggaagaccatgaaatttattgggaagctgcttctctacattctcatcgctctgttagtggcgatcgctggcctctattttcttctgcaaacccgctggggagcagaacatatcagcgcatgggtttccgagaatagcgactatcatctggccttcggggcgatggatcaccgtttttccgcgccatctcatatcgtgctggagaacgtcacgtttggtcgtgatggccagcccgcgaccctggtggccaaaagtgtcgacattgcgctaagcagtcggcaactgaccgaaccacgccatgtcgataccatcctgctggaaaacgggacgctgaatctcaccgaccagaccgcgccgctaccgttcaaagccgatcgtctgcaactgcgtgatatggcgtttaatagcccgaatagcgaatggaaactgagcgcgcagcgggtaaatggcggcgtagttccgtggagtccaaaagccggtaaagtgctgggtacgaaggcgcagattcagtttagtgccggaagccttagcctcaatgatgttcctgccaccaatgtactgattgaaggcagtattgataacgatcgcgttacgctgactaacctgggtgccgacatcgcccgcgggacattaaccggaaacgcgcagcgtaacgccgacggcagctggcaagtggaaaacctgcgcatggcggatatacgtctacaaagcgaaaaaagcctaaccgacttctttgcgccattacgctctgtcccgagcttgcagattggtcgcctggaagtgatcgatgctcgtttgcaaggtccggactgggcggtgaccgacctcgatctcagcttgcgcaacatgaccttcagtaaagatgactggcagacacaggaaggcaaactgagcatgaacgctagcgagttcatttatggtagcctgcatttatttgacccgattataaacacggaattttccccgcagggcgtagcgctgcgccagttcaccagccgctgggaagggggtatggtcagaacgagtgggaactggctgcgtgacgggaaaacgttgatccttgatgatgcggcaattgccgggctggaatataccttgccgaaaaactggcaacagttgtggatggaaacgacacccggttggttaaacagcctgcaactgaagagatttagcgccagccgcaatctgatcattgatatcgaccctgacttcccgtggcagctcaccgcgctcgatggttacggtgccaacctgacgctggttaccgatcataaatggggcgtctggagtggcagcgcgaatctgaatgccgccgccgcgacattcaatcgtgttgatgttcgtcgcccgagcctggcgctgaccgccaacagcagcacggtgaatatcagcgaactgagtgcatttactgaaaaaggcattctggaagccaccgccagtgttagtcaaacgccacaacgtcagacacatatcagcctgaatggacgcggtgtgccggtgaatattttgcaacagtggggatggcctgaattaccgttgactggcgacggcaatattcagcttaccgccagtggcgatattcaggccaatgtcccgttgaaacctacggttagcgggcaattgcatgccgtgaacgccgcaaagcagcaagtgactcaaaccatgaatgctggcatcgtttccagcggtgaagttacaagcacggagccggtgcggtaaacatcaatctcgccgggtacgactcagacgtacccggcattccatcaatagattacaacgtaattgtcagcgcattcccttgaggcttcaccaccagcccctgctcactttcagcctggctaccgtcttgcagaccatttactttcacaacattgcgcaggcacagtgtccagttcttcgcctcgcccgcaccagtcacagtaatcgtgttgccagtacgtgctgcttttaaagtaaagatcacgcttccgtcagcagcgggcacttcacagacggcttcatgcccgtcttgcagattgaagaggtggaatgccgtgccttcgtgccacacgtaatcgggacgttgatcgttgttgcccagcgccagtagagtgttatcacgcacataaacgggcagactcaggaagccgtgctgctgtttatgccagcgactaccgtcgagttcatcgttgtgccacaggtgtgtccagcgaccttccggcaggtagaactgcacatcgcccgcttcagtgaacaccggcgcaaccatcacgttgtcgcctaacatgtattgacggtcaaggtaatcacaagccggatcgtccgggaactccatcatcatggcccgcatcatcggcgtaccccgcgcgttcgcacgcgcagcttcacgatacagatacggcatcatgcggcatttcagttgcgtgaagaagcgcaccacatcacaggactcatcatcgtaggcccacggcacacgataagatttgctaccgtgtaaacggctatggctggagagcaaaccaaacgcgcaccagcgtttgtaaacgtgcgccggagcggtattttcaaagccgccgatatcgtggctccagaagccaaaaccactaaggccaatagacaaaccaccgcgcaggctttccgccatactttcgtagttagcgtaacaatcgccaccccagtgtaccgggaatttctgcgcaccgacggaggcgctgcgggcaaacaagacagcttcttcctcaccaacggtgtccttgagcacgttccacaccagttcgttgtagatgtacgcataatggttatgcattttctgcggatcggaaccgtcaaaccactgaacatcagttgggatacgttcgccaaagtcggtcttaaagcaatcaacgcccatcgcgaccagacctttcagtttgtcggcgtaccatttgcaggcatccggattggtaaagtcataaatcgccagacctggctgccatttatcccactgccataggctaccgtccgggcgtttgagtaaatagcctttctcttgtaactctttaaagacgggggatttttgaccgatataggggttaatccagacgcagattttcagtcctttcgctttcaggcggcggatcatcccttccgggtcagggaaagtcagcgggtcccactcaaaatcgcaccactggaaggctttcatccagaaacagtcaaagtggaaaacatgcagcggcagattgcgttccgccataccatcgataaagctgtttaccgtcgcttcgtcgtagttggtggtaaaactagtggttagccacaggccgaaggaccacgcgggcggcagcgccggacgaccagtaaagcgggtataacgatcaagtaccgctttcggcgtcgggccgtcgataacaaagtattcgagatattcactctcaacgctgaactgcactttggagactttctcgcttcccacttcaaaagagacacactggggatgattgaccagtaccccataaccacggttagtcatgtagaacgggatatttttatacgcctgttcagtacttgtgccgccgtcccggttccaggtctctaccgtctggccattgcgcaccagggcagtaaagcgctctcccagaccgtaaactgtttcgccaacgccaagatcaagccgctcaaacatataattgcgttgattattcgtgtcctgcacgtagccattatttttcacctgactaccggtaatacgttcgccgttgcgcagaaaatccagactccagaactcacctttgctgacacgcgcgcttaagttgccacttttaaactcagcataacgttctgtgttttcgattgtgaccttcacgtcctgcaaaatattgagcggataatgaggaccgttattcagcgccccctgaaaatgctcaatccgcacaccgacaataccttcctgtggggagaaaaagcgcaacgtaaataaaggcgtatcaagctgccaggtacgttcacgcacatcacggggggcagcatagaccaccatttcattatcctgctgttcaacctcgaacacctgaagcgggtgaatcaaattgaggccaggttgaatcaaccagtttccatcgctaattttcattgccgttccttagttctgcacttcttgagaggtgaattgttgctggcaacggcgtttaccctgagccagctgttccataacggttttcagattgtgcgtcgtgagactgtagtagcgtttagcgataatcgcgctcagcaaataacagatcgccggaacaatcgtgaatagcgcaataatgatgctaatcgtggcgctgttctgcgctttttctgccgcatcatatccgccataagccagcatccagccgataagagcgccgccgaaggccaaccccagtttgagcacaaacagcgtgccagcaaaactgatcccggtcaggcgtttaccattgcaccactcgccgtagtcgacggtatcggacatcattacccactggataggtgtcaccagttgatgcaacacaccaatcacgaagatgaagacaaacatagtgatgctggcctgcatgggaacaaagaacatcgcgaggctaatcactgccagcagggcgttcgtccaccagaagatagtgactttacatttccagtcggtcagaggttttgccagtgcggaaccaatcaggttacccacgcaataagtggtgagaaaagcgacaaacacttccggcgtgcccaaaatccatgtgacgtaatacatcatcgccccaccgcgtacgcacaccgccaggatattgaaaatggttagtaaaccgacaatccgccactggtcgttttgccagatatcacgtaaatcttcccgcatagacgttgttgtaggtggtgcttcaacgcgttctttagtggtgaagaaacaaaatgccagcatcatgaatgccaccacggaaaggaccgcgataccgccctggaaaccgagtggtttattatcaccgccaattaaattaaccagtggcatcatcagaacagtagaaagcatgcctcccgcggtcgccagcacaaaacgccaggattgcaggctgatacgctgagtcgggtcattggtgattacaccacccaatgcgcagtaagggatattgacgacggtataaagtaaggtaagtagggtgtaagtaattgctgcatagatcattttgccgttcatactgagatctggcgtgctataggccagtacacagacgatcccgaatggcagtgcgccaaacagtacccacggacgaaatttaccccagcgagagcgcgttcgatcggccaacaaccccatgcaaggatcggaaatcgcatccagtgcacgagcgaccaaaaacatggttccgacaaaaccggcaggaatgccaaaaatatcggtataaaagaacatcatatataacattacgttatcgaaaataatgtggctggcggcgtctcccatgccataaccaattttctctttaacggacaacacttcactcttcatctgcttttccttgatgctataggggtgctgagaccgataacgcattttgtaaaccatccctgtgagagcgaatattccgatatctggttattaatttatgattcttgttttatgtgatcgtggtagcgttaattccgctcatatatcattgtaaaatatgggttttatatgaactataatgctttcgtgataatacgctgcgtgtattaggcggaaaaaactgatctgggggatgtagaaactcaaggaagtagctataatgcgccccgcctccatgtagcaatcgaggcgcggaagatcgtcgtctccggtgaggcggctggacttcaaatccagttggggccgccagcggtcccgggcaggttcgactcctgtgatcttccgccaaaatgcctctcctgacgttctccaaccccttgtaatactgtcaatccagatattttctactgctcaatattcaatcggcttcaggaatacctggtctaaggttttgtgatggacgatgagcggctgaagaatccgcctgtcggttcttctgtcctcgaacgcatccgcgatattcacgccagtatgcgccgtgtttatttgcaggtgatttgcccccctgctgactctcagccaactgtatcgccattaaggtgaagatgttgttttactcgccccagaacacccttttttatacgactattctatttctttaaccgctggcgaaaaaaactgactataaacttcaccaataatcagactgccatcaagattaatttgttcatttaatatatcaaatcaacttgttttatttttactatcaaaaatagctcattgccttactataattaatatataaattcggtaattaattcttaacatgcttttactaataatctcaattgctggccctataatattgcgctagcattgctttctggttgtatcagcgatactcaaaaattcttaatacaatactcattcgactggtacttatttgtaactcagttatattttttcgcccggtgattcagaagaatgcaaaaaacggctaccactccaagtaaaatacttgatctcactgccgcggcatttttacttgtcgcctttctgacgggtattgcgggcgctcttcagactcctaccctaagtatattcctcgcagatgaactgaaagcccgtcctataatggtaggttttttcttcaccggtagcgctattatgggaattctggtcagtcaatttctggcaaggcactccgataaacaaggcgaccgtaaattactgattctgctatgttgcttatttggagtgctggcctgcacgctttttgcgtggaatcgcaactacttcattctcctcagtacgggcgtacttctgagtagttttgcttccaccgcaaacccgcaaatgttcgccctcgcccgtgaacacgccgacagaacaggccgtgagacggtcatgttcagtacatttttacgtgctcagatcagccttgcctgggttatcgggccaccgctcgcttatgaactggcaatgggatttagttttaaagtgatgtatctcaccgctgccatcgcatttgttgtttgcggactgatagtctggttgtttttgccaagtatacaaagaaatattcctgtcgttacccaacccgtagaaattttaccctccacccacaggaagcgggatacgcggctactttttgtggtctgtagtatgatgtgggcggcgaataatctctacatgataaatatgccgctatttattattgatgaactgcatctaaccgataaactgactggagaaatgattggtatcgctgccggtctggaaattccgatgatgttaatcgcaggctattacatgaaacgtattggcaagcgactattaatgctcattgctatcgtgagtggaatgtgtttttacgccagcgtactcatggcgacgactccggcggttgagctggaattgcaaattcttaatgccatcttccttggtattctctgtggtatcggcatgctttattttcaggacttgatgcctgaaaaaataggctctgcgacaacgttatatgcaaatactagtcgcgtcggctggattatcgccggctctgttgacggaattatggttgaaatctggagctaccatgcgttgttctggctggcgatagggatgttgggtattgcgatgatttgcctgctgtttattaaagatatttaactcaccagtctgggctaagaaaaatcggcgtggcgcaaacagagccatcctcgccatttttgctatcatgcctgcatacataaacgacaaaacagtatgcagagggaaaaatgggttccaccagaaaggggatgctgaacgttctgattgccgccgtgttgtggggaagtagtggggtctgcgcgcaatacatcatggagcaaagccagatgagcagccagtttttgactatgacgcgtttgatattcgccggtttgattctactgacgctgagttttgttcatggcgataaaatcttttctattattaacaatcataaagatgccattagcctgctgattttttccgtggttggcgcgctaactgtacagctcacttttttgctaaccatcgaaaaaagcaacgcagccacggcaacggtgctgcaattcctcagtccgacgattatcgtcgcctggttcagtctggtgcgtaaaagccgcccgggcattctggttttctgcgctattttgacaagcctggtcgggacttttttattggtgacacacggtaatccgacgagtttaagcatctctcctgccgcgttgttctggggcattgccagcgcatttgctgctgcattctataccacctatcccagtacgctaattgcccgctatggcacgttaccagtcgtcggctggagtatgctgattggcggtctgattctgttgcctttttatgccagacaaggaacaaactttgtcgttaacggcagtttgattctggcgtttttttatttggtggtcattggtacgtccctgacatttagtctgtacctgaaaggagcacaattaattggcggtccaaaagccagcattttgagctgtgcagaaccattaagtagcgcgctactctctttgctgttgctggggatcacgttcacattaccggactggctgggaacgctgctgattctgagtagcgtgattttgattagtatggattcccgtcgccgcgccagaaaaataaatcgtccggcgcggcataagtgagaattaccagccaggcaccgcgccaccgttaaaaatggtttctgccgctttagcgacttcgggactttgataagattgcagaaattccttcacgttttctgcattcttattatcttcccgtgccaccaaaatattcacatacgggctattcttatcttcaataaatacgctgtcgtgcaccggagaaagcccggtctgctgaatgtaagtggtgctgataatcgctacatcaactttgggatcatccagtacgcgcgggagctgcgccccctcgagttccataatctgcaaatgacgaggattatcggttatatccagcgcggtaggtaataacccttttccctctttcagagtaattagcttctctttttgcaacagtaaaagtgcgcgaccaaggttggtcgggtcgttggggatcgccactgtcgcgccttcttttatttgcgccacggttttgatttttttggaataacccgccatagggaagacaaacgtatttcccaccgctaccagtttataaccatgcgcctgattatcttgttcaagaaagggtcgatgctggaagacattcgcatcaagttcgccatgatttgtcgcatcgttcggtagcaagctaccgctaaatcctaccagttcaacatcgaggccatatttctcttttgccacctttttagcgacttccgcgacatcttgttctgcgccatttataacgccaactttaatgtgttttgcatcgctgctactctggtcgcaacctgccagcagaattccggccagcaataatgcggcccctgtccgtagatgatgtgttgtcagtttcatttttttatccttttattaatgattacctgactatagcggtaaggtcgctgcggtttaaaaaacgaaacgctatcgataagaataaaaaggaataaaagtggaatataaagtctggcacttcttactgaccacgcaagcgcgtttcgtacagcatgatgagagcgatgaaagcaaactacacttatgcttcattcgatacacatttgtaaaaggttgaatccatgaaaccaacgacactactgcttattttcacttttttcgctatgccaggcatcgtatacgccgagagcccttttagcagtctgcagtccgcaaaagagaaaaccacggtattacaagatttacgtaaaatttgcacgccacaggcgagtttaagtgatgaagcgtgggaaaagttaatgttgagtgatgaaaacaataaacaacatatacgcgaggccatcgtggcgatggaacgtaataatcagagcaattattgggaagcgttgggtaaggtagaatgcccggatatgtaagaacagcaacaactactgaccaacgcttctttacctgatatcaggatttcttcattttcacctttgcagtaaccaacaatgcagtcagcaacatcaatgtgccggacaacatcaacgggctagtcagaccaatattatccagcgcataaccgccgattgccgcgccacaggtattagcaagctgaataaccgccacctgaatagacccggctttttctgcctgatcggccaggctgcgggtgatccacgtactccagccgacgggaaccaatgcaaaagttagcccccagataatcgccacgccggtagcaacgattttatcgcttccccacaacgtcagtaccaacgcactcacagccagtattaacggcgcgcctgctaaggccagttttacgctacgtttaagaatgaagctgctaaggctcgtaccaataaagctggcgataccaaaactcaacagcaccagcgttaagccatccacgccgaatcccgccaggttcatatacaccgggcgaatatacgtgaagaaagcaaactgcccggcgaaagacatgaagatggcgatcatccctgccatcacacccggacgttgtaataagcggaaagtattttgtttctgatggctgggttcgcctggcagactaggcaaacttttgataatccagaaaatacacagcacgcccatcaccgccgccgcattaaagacattgcgccaaccgataagctcgcctaaaaaactgcccaacggcgcggcaatcaccagcgcaatagaaaccgcgccgaagatcacgctcagcgccttcggcaccgtacgcggcggcaccagacgcatggtcaggctcgcgctcatcgcccagaacccgcccagcgccagccccagacaggcacgaccgattaaaagcaaactgaaactgttagcaaaggaaaccagcaagcaggagagcgtcagcaaaacggcaaacaaaataacaacgtagcggcggtcagtagcctgaattgtctgggtaataaacaaactggcaaacattgccacaaaggcggtcacggtcacgctttgcccggcaaccccttcgctaatgcctaaatcctgggccattggcgtcaacaaactgacgggcaaaaactcaacgataatcagacaggcgacacaaaacgccacgctgaaaacggcactccagttcggtcgggtgatggcatccgcgccgcggttttcggcaataaattcactcatggtgttacccgtggcatgtttcaggggaaaagcgctccactttaacatactaatgtgactcgcatttaacgtttttgcaacttttacggtgttgctactgctggagttaagatcgaaacggaacagggcaaagattaccggatgcggcgtgaacgtcttatccacccgacaggtcaggcgcggtctgtaggctgataagacgaaacggtttcaatgcaaccagtgaacgccctcggcaggctgaaagaacgcgttatagcgcatctgaaaagcattaatatcctgcatttcaggttcggtttcgcgcagaaaacctagcgccagcctgacctgagcgtcggtaatcggcgcggcgaggcgagctttttgtaaaatccgatgccattgcagcaggttctgttcgctaccatcgacaatgacaatttgccagatgagcaacacctgcgcggcgttttgcaggtggctctcatccggacgatgcaaataacgtaaaaattcgtcaccagcactctttcccatttgatcgaccatgctctccacgggtacgacatcgatgttcagccgatcgctgagacggcgaatcgcttttctggccccggatgtcagcacccgaaaaccaaccacaaacactaccgccagcgtggcgagcattatccagatcatgagttctcctgcgtaatcagaactcatgatatctggaaaccctcgccagttattaatccaccagaataatcttcagtgcaaacagagctgcgaccaccaccacacacaggttcagatcgcgccagcgcccggtgcatactttcatgatgcagtagctcataaagccgagtgcaatcccttcggtgatgctgaaagtaaagggcatcatcaccgtggtaataaacgcaggcacgctttcggtaaaatcatcccagttaacgcgcgccaggctgctagtcatcagcacgccaacaaagattaacgctccggcggttgcgtaaggaggaactatcgccaccagcggactgaagaacataaccaacaggaacataacgccaaccacaaccgcagtcagccccgtgcggccaccgactgccacaccagaagtactttcaatataggcagtaacagagctggtgccgataaacgcacccgccacgctactgacgctatcaacatacagcgccttattcatattggggaatttaccgttaccatctattaagcccgctttatcagttacaccaattaatgttccactactatcaaataggttgatcagcataaaggagaaaatgataccggcgagttcaagtgttaacgcgccgctcaaatctacttcaccaatgacgccgctaatatcaggcggaatggaatagacgccgctaaaatgaacatcaccgaaaaataatccacagcaagacgtcaccacaatagaaaccagcaccgcggcatgaaaatgacgactactcaacacggttataataaaaaaccctaaaatacctaacaacacgccgtgagaacttaaatcgccaatcatcaccagcgtgtctttattggcgacaataacgccagtattttttaatcccattaaggcgataaataatccaattccgctggtgataccaatacgtaaacttaagggaatgttggagatcatccagtaccggatacgaaacagcgtgagcaaaaatagtccaactgcgccccagaatattgcgcccatcccggtctgccaggagatgcccatcgcccccacgaccacgaaggcaaagaaggcgttcagccccattgccggagccagcgccacgggtaagttagcaaatatccccatcgcaatactgccgataccggcaatcaaacaggtggtaacaaacaccactttcgggtccatttgtgccgcgccgaggatttgcgggttcacaaaaacgatgtacaccatggttaaaaaagtggtcatccccgcaatcaattctgtgcggacggtggtcccatgctgaggtagtttaaataatcggctaagcgtcccactttcattactcacgtaatcggtattgtcattattcatttttttgtccattggaggagatttaatcccttgcttttgtaaaacaaatgacaacaacggttcagtgataattatcacatttcaattgcacattaatggatattctttaataatctcgcgacgtttctttatgataaataataatcaaattgataaaatcaaaatgagaaaaatatgaataattctattaaccataaatttcatcacattagccgggctgaataccaggaattgttagccgtttcccgtggcgacgctgttgccgattatattattgataatgtctctattctcgacctgatcaatggcggagaaatttccggcccaattgtgattaaaggacgttacattgccggtgttggcgcagaatacactgatgctccggctttgcagcggattgatgctcgcggcgcaacggcggtgccagggtttattgatgctcacctgcatattgaatccagcatgatgacgccggtcacttttgaaaccgctaccctgccgcgcggcctgacgaccgttatttgcgaccctcatgaaatcgtcaacgtgatgggcgaagccggattcgcctggtttgcccgctgtgccgaacaggcaaggcaaaaccagtacttacaggtcagctcttgcgtacccgccctggaaggctgcgatgttaacggtgccagttttacccttgaacagatgctcgcctggcgggaccatccgcaggttaccggccttgcagaaatgatggactaccctggcgtaattagcgggcagaatgcgctgctcgataaactggatgcatttcgccacctgacgctggacggtcactgcccgggtttgggtggtaaagaacttaacgcctatattactgcgggtattgaaaactgccacgaaagttatcagctggaagaaggacgccggaaattacaactcggcatgagcttgatgatccgcgaagggtccgctgcccgcaatctcaacgcgctggcaccgttgatcaacgaatttaacagcccgcaatgcatgctctgtaccgatgaccgtaacccgtgggagatcgcccatgaaggacacatcgatgccttaattcgccgcctgatcgaacaacacaatgtgccgctgcatgtggcatatcgcgtcgccagctggagcacggcgcgccactttggtctgaatcacctcggcttactggcacccggcaagcaggccgatatcgtcctgttgagcgatgcgcgtaaggtcacggtgcagcaggtactggtgaaaggcgagccgattgatgcgcaaaccttacaggcggaagagagcgcgagactggcacaatccgctccgccatatggcaacaccattgcccgccagccagtttccgccagcgactttgccctgcaatttacgcccggaaaacgctatcgggtcattgacgtcatccataacgaattgattacgcactcccactccagcgtctacagcgaaaatggttttgatcgcgatgatgtgagctttattgccgtacttgagcgttacgggcaacggctggctccggcttgtggtttgcttggcggctttggactgaatgaaggtgcgctggctgcgacggtcagccatgacagccataatattgtggtgatcggtcgcagtgccgaagagatggcgctggcggtcaatcaggtgattcaggatggcggcgggctgtgcgtggtacgtaacggccaggtacaaagtcatctgccgttacccattgccgggctgatgagcaccgacacggcgcagagcctggcggaacaaattgacgccttgaaagccgccgcccgtgaatgcggtccgttacccgatgagccgtttattcagatggcgtttctttctctgccagtgatccccgcgctaaaactaaccagtcaggggctatttgatggcgagaagtttgccttcactacgctggaagtcacggaataataaaaaaagcccggcgtcatgccgggcaaaagtcaccagttacgtttatgccactgtcaactgctgaatttttttctcgcggcggattttgcgttcttccattaccgccactatcgccatcaggcagatacaaccaatcgcggcgatatccagcgcggcgaaggtgcctgcccagccggtaaggccgaataccggcgtcccatcggcaatcattcccagacctaacttggcaaagctgtcaccaatcaggtaagcaaaggtgcctttaataccatcggcagcgccaatcgcttttttaggtacaaagccaacagcagccacaccaatcaacaattgcgggccaaagaccaggaaacccaacgcaaagagagaagccagatagatatattcgttactggcatgttgatacacaccgagcgtggcgataatcagcgccagcgcgatgcaggccaccaggccacggcgaccgttcgccaggtcagagagccagccccacagcagcgtaccgaccagcgcaccagcttcaaacagcgtaaagccctgaatcgccaccgctttagagagtttcagttcctggaacgcgtatacggtactccactggtcgataccaatacgtaccacatagaggaaaatgttggcgaagcacagcagccagatcactttgtttttcagcacatactcaacaaagatctgccacttggtcatatcggtagattctgtctctttgtcctcttcgctgatctcctcgccgaacagttcttcagctttgccgaggccataagattccggggagtcgctgccgtaacgcaggccgataaaaccgacaatcagcgcgataatgctcgggaagataaacatgccgatgacatggccatcgaacaggtaatttgccccgaacagcgccacacctgctgcgcctgcaccgccaaggttgtgagaaatattccagaaaccgaggaatgtcccgcgtttacgacgcggcgtccatttggtgatggtggagtaactgcagctaccgccggtactctggaaaaagccgcttaaggcgtagaaggcaatcatcaggaacaggctaacgctgccgctgcccatactggcactgaagcccagcatacaaatagcagagaggatcagcatgaacggcaggaattgtttggtgtttttgccgtcggcgtagtaggaaaccagcgttttacccacgccataagtgatggagaaacccaggccgatcatccccagctgcgtcatgctcaacccgtaggtgctaatcatatcgttctgcgcgatgttaaagttcttgcgaatcaggtacatcgtcaggtagccgataaagaccaccaggtaggattgcatgaacggtttgaaccacattttgcgccgcacttcgagcggaaggtccagggtcggcttgcgaacctggtttaagaaagccagcatgggttactcctgaaatgaatacctgcgtgaggcatgcattgtaaaaatcagcagcaaatcaggcctgagatagcgtccaggcaaaacctggaaaatttcttagttttgccggatatgaagtgaaaaggtgagatgcatcacgcttcgcgcggtgtctgggcgttcaaaaagggcagtaacagcagtgcggaaatcccggcggcgatagagataaccacaaaaaatccgctccagtgccaggtatcgagtactttcgccagcggccaaccagcaaggctcgcccccagataagcaaacaagccgacaaaccccgtcgccgcccctgccgcctctttgtgggaacactctgccgccgccataccgattaacatctgtgggccaaagacaaaaaaaccaatggtgaagaagcaggttgcctgcatcacgtagctggcaaatggcatcagccacagggagccgacactaagcaaaattccggcggcgaaaatcaaattcatcggccctcggttgccgttaaacaatttgtcgctgccccaaccggctaccagcgcaccgataaatccgcccagttcaaacatcgtcactgccgtattcgccgtgaccagatcgacgcccagtgtctcggacatatacaaattgccccagtcgttgatcgccgcccggaccacatagaccagcacatagcaaaagctaagcagccagatatacggattcagcaacacatatttggtgaggatctctttacgcgtcaaccctgccccttcttgttgttgagcaatttccagcgcgtcgtgtcgccattcaccgaccgccggtaaacctaacgcctgcgggcgatcgcgtagccgccagcagagaaaaatccccacgactatcgccatacaaccagcaatcatcatcccggcacgccagccgtaatgcagcgcagccgctgccatcacaatgggaatgagtgcgccgccgacgttatgcgccgtgttccataatgcccaccaaccgccgcgctcggtacgactataccaggccgttaacagacgcgcacacaccggactaccccagccctggaaaaaggcgttcagcacccagagcacggcaaacgcccataggctcgtgctgaagccaaacagaatgttgataatgcccgtggcgataagccctatccccataaaataacgggcattactgcgatcgctgacaatgccggagacaaacttgctcacgccataggtaatgtaaaacagggtcgctaacaggccgatatcgctacggctgagcacgccgttagcaaggatttctggtacggcggcgttaaaacttttccgcgtgaagtaaaacagcgcgtaacccagccagatggtcagcagaatatgccgacgccagtagcgatagcgggcatcaatttcatatttatcagtcattaatggcgcatcggcaggcgctttcagaaacggcaacatcatcaaaccttagacatagcgttgaggtagagaaacgctgacacgcgtgccgtgcagacaggaaatgtgtaatgtgccacccagcgccgttacgcgctcgcgcattccggtgaggccaaaaccttgttgcccggaacccggcggcaaaccgctgccatcgtcttcaataaccagcatcaaccgttcatcctgctgccagccttgcagggtgaccgcgctggcatcagcatgtttcacaatgttgttcagcccttcctggcagacacgaaacagcgtcacgcgctggttttcgcttaacgcactttcatcgattcgccattcgagatggctgacaataccgcgcccttccagctccatttcccgcatcagactgcggatggcctgctccagggtgagatcatccaactggcgcggacgtaaccgacccaacaaacggcgcaccgcgtcgtaaacgcccaggcttagttgttcgatgagctgcccgctctgcttcacgctggcgttatctgccgccagccgctgaacaatgcccgcctgagtacgaatagcagtgatggtctgaccgatatcatcatgcagctcacgcgccacatcacggcgcacgctctcttcggtttccagcaaccgttcagccagatgctgattgcgcgccagttccttttgcaggctctggttaagttcacgcaaccgctggatgccagcgccaagcaacaaccctgtcagactttgcaccagcaggctgagcaataaatccaccggatgatcgcgccaggtttgactggcgatcagcgcgatggcgttcatcaacgtcgcaatcagcgccccttgccaaccatagtgccaggccagcgcgataatcggcagcgccagacagaatggcgtaaagcggctcagttcgtccggcaatcccaactggagccagagactgataacaaacagcagcaagtaccagaccagatgtcgcccgcgccagttgattggctgagaaaccagactcggaccgagcggcagccaggtgttattggcgagatagtgccagaacaccagacatatcggggccagcgtcaggccgccagttaaagtcagcaacagcgcattccagctctctttgccgtgccaaagccagggcaggctctgcaacaacgccgccgccgttaacgccgccccctgtaacagcaaggtgcgccagtcacgctgatggcgatagcggctgatcagcgctacgggcagtaacgtcagtaaactaccgatcatcaataacggaaaatgggttaaaccgaccgcctgcgttagccagtaaatcagcagccactccgcgcccagcaatacgggccagtatccgcgcgggcattgcagcattagccccagacgcagaccaaacggaaataacagcaccgccatatcagggcgctcaaccagatgcaggctgatactccacaggcaaaaccatgcggcagagaagataaaaaagcaggcaataacggtaattaagcgggagaacaacgtcttcatcaccagccatcaaacatgcggcgcgccagctctacgtcgttactgacgcccagtttttccatcagattggcgcgatggacgtgtaccgttttcggactcaagcccagttcggcggcaatctctttcaccgccattccttgcgccagtttttccgccacctggcgttcacgtttggttagcgggtcctgacgaccggatgccagtttaatggcaatatccggcgtcagataacagccgcccgtggcaaccgtatgcaccgcagcaatgagttcatccgggctacagcgtttggaaagaaagccgcgtgcccccgcgttaagcgcctgctcaaccagcgcaggactgtcgtgaacggagagcataatcgtcgccatacctttcggcagctggcttagcagctccagaccggagatatcgggcatggagatatcgcaaatacacacctgcacaccgcgccccggcagccccgccagcgcctcgcgcccgctaccaaactcggcaactacctgcaaatcaggttccagccccagcagctgcgcaaagccggagcggacgatgaggtgatcgtctataagggcaacggtgatcatggtcttgtcctggcgggtaaaaaaaatacgcgcttaccttaacgataagcgcgatgttgttcaagccttgagcggttactgaaaaaacaccgcgatcttgttaaacatcgtcggatcggactgattacgctgcactttcacgacatcttccagcttatcgatttggcttatcatctgctccagacgctggtcgtcattgaccagtagccagatatggcttttgtcgctgtcctgaatcggcagacaaagaatgccttcaacgttaaaagcgcggcgggcaaaaaggccacaaacgtgggtcattacgcccggatggttgcgaacggtgagctccagaattacgttgtcatgagttgtgttttgcatggcttattcccccaccatttcagtattcgccgcacctggcggcaccatcgggtaaactttttcttcggcatcaatgcgcacatggatcagcgccgggccagggcgattgatgatttcctgcaaactagcctgcggatcggcttcgttattcaaatcacaggtttcgaggccgaatccggcggcaatctgcataaagttgattttgcccggataggtggcggcaaaaacgccttgctcgtagaacagactctgttgctgatgcaccagccccagcgcttcgttgttcatcagaatgattttgacatccagctgattttcactggcggtcgccatctcctgaatattcatcatcaggctgccgtcgccggagaaacacaacactttgcgatccgggttcgccagcgcagcgccaatcgccgcaggcaggccaaaacccatcgtgcccagcccaccggaggtcagccactggcgtgggcgattgagcggataagcttgcgcggtccacatctgatgctgaccaacgtcggtggtgataattgcattgtcatcgacacaggcggcaacggcgttgatcaggccgtaatggcttaacggatcgcacgctttcgggattggacacggaaactcacgctgcaaatccgctaccaactggtgccactctgcacgcggttgcgcttccaccagcgggatcaactgcgccagcacgtcatcaacatccgcctgaatcgccacgtgcggctgcttgattttacccagctctgcacggtcgatatcgacatgaatgattttggcattcggacagaactgctcggttttgccaatcgcccggtcatcaaaacgcgcaccgagcactatcaacaaatccgcctcctgcaaaatatagttggtgctgcgcacgccgtgcatccccagcatacccaggctcaacggatgcgcttttggcaacatgcccagcgccattaaagtcatggtggtaggcagttgcgctttctccgccagttcacgcacccgtgcgggcgcattgatcacaccgccgcccagataaagcaccgggcgtttggcagcgttaatcatcgccgctgcgtcacgaatgctttcttcgctaaaggcgggggcggcggctttttctgccatagcgggctgtgtttcaatctcaaaaactgccgtttgcacatccttaggaatgtctatccacaccgggcctgggcggccactttgcgcaatgcggaaggcatcgctcatgacctgcgggagttcttcgatatgtctgaccagatagttgtgtttggtgatggggatagagatgccgtaggtgtccacttcctggaaggcgtcggtgccgatcatgctggcgggaacctgaccagtgatgcaaatcagcgggatggagtccagccgcgcatcggcaatggcggtcaccaggttagtcgcacccggtccgctacaggccatacagaccgccggtttaccgtcggtgcgcgccattccctgagcgataaagcccgcgccctgttcatgacgggccagaatatggcggatttgcgtgctttggcttaaggcatcgtaaacaggcaggatagaaccgcccggaatgcctgtcacaatcttaatgccctgctgttccaggaaatgaacgataaattctgcgccggtaaagcgcttacgcgtgcttgttgtgccgctacttgccatgctccagtccttttcttctgggccgactttccgggaggtgcttaaacgaaaaaccccgcccggtttgcgccggcggggttttggaatcgtgtgttgttccagtccttacggcgcattgccgacgaccaccaccacacgcacgacgaccactgcggcggatggcgcagttggtagtagttttgcgttgagcatggaagtagtcattggggaccttgttggttttgtgtttaacaatatttatacaagcacagctttacaggggagacaatggaaaatttttcagcaagggaaaattgaggggttgatcacgttttgtactgaattgcagataacaaaaaaccccgccggagcgaggtttcgtcagtcgcctgcggctggtaaccgcaaagcacactgtattatgtcaacactgaaagtatacgtgttccgcgcagaacgcgcaatttcggcacgaattttgacgtatttagtgcatagttgagtatcgatcacagtttgcgttttgtccaaatattactgtttatttatacagtaaacttctataatatcactgtacgcaatgtgttatgcgggggccgcatcgttacccggcgcactaagtcctggctgaaacgggtggtgccgtcagcgccttaaccccgcgtgagcacactgtgttatgtcaacaagcacaacgtttctccttgagataccgcgtgcacaacagctggcaacaggcagcggaaaggtacgtcagctggcagtgctcctgaaccacaggagacgcgtatgaacctggtggatatcgccattcttatcctcaaactcattgttgcagcactgcaactgcttgatgctgttctgaaatacctgaagtaattcagattcaagtcgcaccaaaggggagcgggaaaccgctccccttttatatttagcgtgcgggttggtgtcggatgcgatgctgacgcatcttatccgccctaccatctctcccggcaacatttattgccgcttttgtttacatattctgccgctaaacaattccccattcctggcgtatatctggctaacattcatcaatgtgatagattcctctcccgcatttatgggaatgcgtagtgacttattctaattatttttataaaagcatccgtgataatgaaaaggcaaagaaacgtcaatttgttattgatgttggtattactcgtggccgtcggtcagatggcgcaaaccatttatattccagctattgccgatatggcgcgcgatctcaacgtccgtgaaggggcggtgcagagcgtaatgggcgcttatctgctgacttacggtgtcagtcagctgttttatggcccgatttccgaccgcgtgggccgccgaccggtgatcctcgtcggaatgtccatttttatgctggcaacgctggtcgcggtcacgacctccagtttgacggtgttgattgccgccagcgcgatgcaggggatgggcaccggcgttggcggcgtaatggcgcgtactttaccgcgagatttatatgaacggacacagttgcgccatgctaacagcctgttaaacatggggattctcgtcagtccgttgctcgcaccgctaatcggcggtctgctggatacgatgtggaactggcgcgcctgttatctctttttgttggttctttgtgctggtgtgaccttcagtatggcccgctggatgccggaaacgcgtccggtcgatgcaccgcgcacgcgcctgcttaccagttataaaacgcttttcggtaacagcggttttaactgttatttgctgatgctgattggcggtctggccgggattgccgcctttgaagcctgctccggcgtgctgatgggcgcggtgttagggctgagcagtatgacggtcagtattttgtttattctgccgattccggcagcgttttttggcgcatggtttgccggacgtcccaataaacgcttctccacgttaatgtggcagagcgttatctgctgcctgctggctggcttgctgatgtggatccccgactggtttggcgtgatgaatgtctggacgctgctcgttcccgccgcgctgttctttttcggtgccgggatgctgtttccgctggcgaccagcggcgcgatggagccgttccccttcctggcgggcacggctggcgcgctggtcggcggtctgcaaaacattggttccggcgtgctggcgagcctctctgcgatgttgccgcaaaccggtcagggcagcctggggttgttgatgaccttaatgggattgttgatcgtgctgtgctggctgccgctggcgacgcggatgagccatcaggggcagcccgtttaagcgcacgtcaccgcagcatcgtcatcagctccatgggagaacgatgctgctttatcagatcacgcatcacccgcatatgcggtgcggagtaagaataaaacgcctgatagcccgcacaaagcacgctgtctggcgtctcctgccgagcgtgcgggcacaggcgatgccagtcgcacgcctggcagtcacagcgcggttgcgggttttcgctgccacaccatttttgtaaggtggcgtcaaaaagctcaatgctgatacgactgatatctgcccgcacccaacactcgaacagggcaattaaaaatttcccccacagctctgctgtcacgctagcggccgtcagatcgccccggtcatcaaattcaagatagggaatgagctgtacggagcggatgccccgctgtttgaaattgtgataaaaatcggcaggttgcagagcatccttgtactctacaaccagtttatgcctgtcctcttcagcatcaatgacctgacttcctgtcatgcgactctctcaataaatacgataagttgatgtatatgcgttacagcaaacagtattgcgagagataacaccgcgagggagatcaaaaatttgtcacggactacgtgaaattgggaaaaatcgctattcgtgacatccattaaattgcgattacgggtgtagtgccagaggatcagcgccacgatggcgagaatgccaatgctaatccagaataacatgcccgcctggtgccagttgtgtttgatagccaacgccatcaacgcgccgtagcccagcatggtacgaaaccacgccagacttgtgcgctccggctgcagtcctgggtcggcaatgcgtctggctttgcggctatccggcatacaacaccagtcccataacgttaattatccggcatacaacaccagtcccataacgatcaccgccacgaccatcaatattaagctaatgattaataagctgttggtgtagggcaggtcctctttcagacgcatcgctttttcattgcgtaaccagcgcaagtagccatacatcgctaacccgccggaaaacagacacaacaacaacgccagcagttcgcgaatgacgggcgtggcgaaatctggcgcaagttgatcaagcccaacccccgccgccagaaatcctagtgcagtacggatccacgccagaaaagtacgctcattagccaggctgaagcggtaatcaggcgcttctccgaggcgggaaattttcattgttgctcctttgcaatttcactaacgctctacctttagcggtttttttaagaatttcgtccgcccgtttcctgatatgcttttgccatccgctacaaggaggtcagatgggtatcatagctcaaaataaaatcagtagtttgggcatgctgttcggtgccatcgctttaatgatggggattatccactttagtttcggccctttctccgcaccaccgccaacgtttgaaagcatcgtggcggacaaaacggctgaaattaaaagaggtcttctcgccggaataaaaggcgaaaaaattaccaccgtggagaaaaaagaggacgtagatgtcgataaaatcctcaatcaaagcggtatcgcactggccattgctgcgctactttgcgcatttattggcggtatgcgtaaggaaaatcgctggggcattcgcggcgcgctggtttttggcggcgggacgctggctttccataccttgctttttggtatcggcatcgtgtgcagcattttgctgatattccttatcttttccttcctgaccggcggtagtctggtttaagcagcctgaataatgcccgccgggtgatcatcagcgggcattatcgtcagaacttctgttttttctcctccaccttcaccccttgtgtcggtaggccggtgtcatagtcgcgtacaactgggctatagccatcttgtggacgtggacgaaacgcccccatccagcgcggccgtgcatctttacgccacggacgcagactccattggtaactgcggaacggatcgcgaattttgtccatgtaatccaataaggcgtcatgcattttgctgcgaacgtctgcaaaacggatatcatcgatcaggttatgcatttcatttgggtcattacggcgatcgtaaagttcatcactggtgaagaggttgagtaccagtttaaagtcatccgtcacccagcaacgcaccggaataaaaccgccaaagctgtcatgctcaatctcgtagcggttaaattccaccatcacgccgcgtggctctttcacggcaaggatattttcccccggcagaatctctggtttttcaatatctgccagcgccatcattgtcggcagtaaatcgatatgactgactggcgtatcgacctgtcgccgctccccttgcgggctacggatgatcagcggaatgcgggtgatgtcgtcatacatcgccgcccctttactgatcagcttatgtgcgcccatcatttcgccgtgatcggaggtataaataacccacgtattttcacgttgctctggcgttaaggcattgatgacccgtccgatttggtcatcaacaaagtcattacaggcaaaatagagcggatggtgataaagcccgtcatcaccgactgggcttggcatcgcctgcgcccataagcggtgatgttccggtttgttagccaggtcatcctgtgctttctcgcccagctcgtagtaaaaatcagcgtatttctctaaatactccaccggacaggtgaacgggtgatgcggctcatcatagctaaccaccatcaggaaaggctcgtctgcgcgcgcaggctgttgcagaaaatccaccgcccgattgctgatacgatgcgcccaggtgaaggtttcgtcgatatggttcgcctgtaaatcttcgacgctgtttaggccattgcgccacaggctaatctctttttccgtcagttcgctaagatagttcgccccatcgaaccagtaatcagcgtcccactccggcggacactcgccagtgccgaaatagtcatgaccgtcgagatgccatttgccgatgtaacaggtgtgatagccggcatccttaaagtagcgccccatagtggagatgtttttgcctggcgcgacgttgttggtccacgggccggactggttagcgtagataccggtaaatagtccggcccgtgcaggcgtacaaaccggactacaggtgtaggcggaattaaagcgaataccttccgccgccagactatcaatattttgcgtattcagcggtttaccgctatagcaaccgaccatattggtggcctgggtatcggtcatgacgaacagaaaattggggcgtttcataggctatccttcccgtcgggagtaaaggttacggctgggtcgtgacgatgccgccagctgtcaaaaatcaggtagacaatcactacggcggcaatgaaataactgatcatcgctaaccagcgcgtaccgtagccgccgaattcagccagcccggcatagacgccaatcatcgcgaacaggatgccaatactcgcgatcttgacgtttttccacggtttcatgtccaccgcaaacgcatctttgaaggtgaacggcgtggcgcgcggtttgataaaaccgatcaccagcatcacgaccacgttgatgcagaacgtacaggccagcacatagaggaaatggaagtcgaacttcaccagatagttgatggtgatgtagctgattatgccaatccccatcgctacttttgccgccagcgccgggatgcgcgggaagaaaaagcccataatgatgatggtaaccagcggcacgttgtaaatgccgttgagctgtttcatccagctatacagcccctgcggcgcgttggcgatccacggcgcgaccagcacgctaacgatagcgataaagaaaccaaatttgcgcccgacggtgaccagctgctgcggctcggcattctggttaatgatgcgacggtaaatacccatactgaataacgtactggcgctattcagaaagccgttgaaggtactgatcaccgcaccaaataacaccgcgccgaagaaacccaccattggcactggcagaacgttattgaccagcgtcgggtaggccatgtcggctttcggtaaatcctgatacagatgaaacgcaatcaaccctggcagcaccagtaccagcgggtcgagcattttcagcaccgccgttaacagcgcccccttttgcccttccgccaggcttttactcgccagcgtgcgttgcacgatgccctgatttgtacaccagtaaaaggtgttcaccagaatcaaaccggtaaatgccgcgccaatcggcaagggatcggtcgggccaccgatactgtttaatttctcggcgtgaacggtggtgagttgctcaatgccctgcataaagctgcccttgcccatcgcgattaggccaaataccggcaccatcaacccgccgataaccagcccaataccgttgatggagtccgccactgccattgcgcgcagtccgccgatcaccgcatacaaaattcccgccagaccaagcaaaattaccagtagccagatagccgcaccgtgagaaatctgtaggctttccccgacgtgaaacaggctgttgagcgccaacgcgccggagtagagaacaatcggcagaaagcagacgccggtggcaattaggaagcagaagtcgatgataatacgcgtcgttttatcataacgttcctccagaaaatcggggatggtggcaatgccgcgcttcagatagcgcggtaaaaagattagcgcgaggaagatcagcgtcaccgcactagtcacttcccagcccatcacgctcatgccgcttttgtaggcctgcccggaaaggccgaccagttgttccgtggaaaggttggttagcattaagctagcggcaataaccggcgcttttagactacgtccggcaagaaaatagccttgttggcttccggtatctgttttgcggaccttccaccaggtgatcaccgccaccagcagcgtaaaaccgacaaaactcaagatttgtaagctattcatctcatagcccttatttatgtttatgtcccggacgcatgaatatagggagaggtaaaatgcgtcgggtcaggcagtcagattcttaaaatacaaacgtcgtatccctgaacggattgttttctgttaagttcaggttgtgagcataattcgccggagggatattaaaatgaatggaaaattgcaaagtagtgatgtaaaaaacgaaactccgtacaatattcccttattgattaacgaaaatgtgatctccagcggaatttctctgatcagcctctggcatacctacgccgacgagcattaccgggtgatctggccgcgggacaagaagaaaccgcttatcgccaacagttgggttgcggtgtataccgtacaaggatgtgggaaaattcttttaaagaatggcgaacaaataacactgcatggcaactgtattatattcttaaagccaatggatattcactcttatcactgtgaaggtttagtctgggaacagtactggatggaatttacccccaccagtatgatggatattcccgttggtcagcaaagcgttatttataatggcgaaatttataatcaggaactcaccgaagttgctgagttaataactagtccagaagcaataaaaaataatctggcagtcgcttttctgacgaaaattatttatcagtggatttgtcttatgtacgcagatggtaaaaaagatccacaacggcggcaaattgaaaaattaattgccactttacatgccagtctgcaacaacgctggagcgtagctgatatggctgccacgatcccctgtagcgaagcctggttgcgtcgtctgtttttacgctataccggcaagacgccgaaagaatattacctcgatgcgcgtctggatctggcgctaagcctattaaagcaacaaggaaacagcgttggcgaagtcgctgatacgctcaacttcttcgactcctttcatttcagcaaagcctttaaacataaatttggttatgcgccgagtgccgtgctaaagaatacggaccagcacccaacggatgccagtccacacaattaacgtaactctggccagtacgctttgttggcctccagcaactcatccagaatagctttggcgacgctggcgctcggtaccgttttgctcaacgtaatcgcctgccacaggtgctgataactacgctgttcccaggcgtccacgaccagtttttccaccgccacttgctgactcattaaccctttctgaaactgcgggatatcgcgctccaccagtggttcaggccgtagtagcgcacgcgcatctgtttgcgatcttgcagcccaacaatttgcgccatccggctttcaataccgattggcatgtcacagatgttgaggattttcgcattcgggcgcagacgacgcgtggcttctgcgacaatggctgccgggttggagtagttgagcatccaggcatttggactatatttttccatataatccaccagttccaggacgccgccaatggaacgcatgccgtacgctattccgccgggtccgcaagtttcctgaccaacaacgccgtggcgcagcgggattttttcatccagttcgcgcatcgggtatttgccgacgcggatgtgcgccatgacaaaatcaacgtcgctgaatgccacttcaggatcggtggtgtaactaaacgcaatgtccggcgctttttctttaaggatgactttacaggcttcggcaatcacttcctgccgcgcaccatcgttatcataaaatttcagtgcacgaagcgggaaacggtcctgattcgccaggagcatcaacacgatgcctggcgtaaaggtgcttccaccgcctgcgacaaccacactgaatttggtcattatactgcctccgtaatggcaacattttctgcactttgatgagaattaattaagctatcgagctgttcacgcagctgagatacatgcagaccaatgatcacctgaatggcatcgccactacggaagacgccgtgcgctcccagctttttaaagacttcgtcatccagcgtttgactcatgtcatgcagtgcaatacgtaaacgcgtcgcgcaattgttaatgctggagatattgccgaccccgcccagggcttgcaggataccggcagcctgatccagctcttttttttggctctgccgcggtggtttggcctcggctggctttgtattcggctttactgtagagtttcacttccgcatcttcacgtcccggcgtgcacatgttgaactgcagaatcagtgtgcggaaaaccacgaagtacagcagggtaaagcacaacccaatggcgatttgggtcagcatcatatccgcgtggttgctgaacatcgggatccagttttgcggtaaaacttagtcaatcagacctccgcccatgttgcccaccacaccaaagagatacattacggtgctcatactggccgccagcacggcgtgtaccgcaaacagcaacggactaatgaacaggaaggtaaattccagcggttcggtaattcccaccagcatggcggttaaggttgcgggaatcagcaagcccgccacttttacccgattttccggtgcggcagtgaagtacatcgctaaagaaatgcccacggcaccaaagattttactgttaccgtgcagggcaaaaccgccttccgggaacaagcttttcagcggctcggcgctcaaactgaactcttgcagatgctgcgcccagtacatctgaatgccgccttcaacagctgccggaccaaagataaactgtccgtagatgaagtggtgtaaaccggttgggatcagaatacgttcgaggaaggtgtaaacccagaccccaagtgcacccgcgctacgcaggaacgcttgcagagattcaatccccatttgtacttttggccagccgagcaacgtcagccaggcacaggggatcatcaccaggaaggcgataatcaccacataagacgtcccctggaaaatgccgagaaaaaccggcagttttttatcgaacagacggttatgcagcgccgtcacaatgccggaaatgataattgcgccgataatgctggtatcgagggttttaatcccggccatcattgtcagaccgctacctgccaccgcgtcctgagtgaaatcgacgccgaagtagcttccccaggtcattcccatcgcgttgatgaaatagttccaggtcaggaaactcaccatcaccgccagacaagcacgcccctgcgcttgcttagcaaggccaatgggtaaaccgacagcaaaaatcagcggcatattacggaataccgtccaaccgccctcttcaataatgtgtacgatttgcgcgaataaactgttcggatcggtcagactttccccgacaaacatcgggttttgcagcaagatggcaagacccaccacaatcccggcgaagggaaacagcagcactggcgtgaacatcgcgccgccaaagcgttgaatttgactgagcatttccacatcctcttttctcaattctgtaagtaggaagcctgattggttatgcggcaggcctggagcgaggataggaagatgcgatcggcagaacatgacgacccaatgggattcgtgatcgctttcatgcttttcgttgggcggtagagatctacgttttcgcgaaaaagtagacctctgtgagcacaggtacacagcatcgaacacatctttaaaaaaaagatgttttttcaatcgattaagcagaacttgtgtgcgcattacccgggcttgcaggcaaaaaagagatctagagatgatctacaaaagcattgcggagcggttaagaattcgacttaactccgcagatttcacgctaaacagccttcttcccggtgaaaaaaagctggcggaagagtttgcggtaagccggatgaccatccgtaaagccattgacctgctggtagcgtgggggctggtggtccgccgccacggtagtggcacttacctggtgcgcaaagatgtactgcatcaaaccgccagtctgaccgggctggtggaggtgttaaaacggcagggaaaaacggtcaccagccaggtgctgatttttgaaatcatgcctgcgcctccggccattgccagccagttacggattcaaatcaacgagcagatctacttctcccgtcgcgttcgttttgtggaagggaaaccgctgatgctggaagacagctatatgccggtaaaactgttccgtaatcttagcctgcaacatctggaagggagcaagtttgaatatattgaacaagagtgcgggattttgattggcggtaattatgaaagcctgacgccagtgctcgccgatagactgctggcgcggcaaatgaaggtagcggaacacacgccactgctgcggatcaccagcttgagttatagcgagagcggggagtttttgaattatagtgtgatgttcagaaatgccagcgaataccaggtggagtaccatttacggcgactccacccggaaaagagttaaccgatactccagaagagcaccgccagtaattggggggtgataatgcgcaggaacattaccaacggatagacagtggcgtaagagagcgccgccgcaccgctggttggatgaagattattagcaaacgccagcgccggaggatcggtcatggaacctgccagcatcccgcacatggtcaggtaattcattttggctaacatccgcgccagaatgccaacagtaatcagcggaacggcggtgatcagggcaccataaccaatccagcttagcccttcgccattgaccagggtattcacaaaatccccaccagatttcagaccaacgacgctgaggaacagcacgatccccagctcccgcagcgcgaggttggcgcttggcggcataaaccagtacagcttgccgatactgccgatacgcccgaggatcaacgccataatcagcggtccgcccgccagccccagtttcaacgcggccgggaatcctggcacaaagacgggaatagaacctaacaatacgcctagcccgatgccaataaacactggcagcatctgaacctgttgcagtttttgctgcgcattccccagcacattggcaacggcatcaattgcggacggacgccccaccagattgaggatatcgccgaactgcaggctgatatcgccactggcgaccagttcgaccccggcacggttcaggcggctgataacaacgtcatagcgttctttaaagtgcaggtcgcgaatacgttttccgagcacgttttcattggtgaccaccacacgctcgacgcgcaaatcagtgcctttcgtggacaggctagtatcgacctcctgaccaatcaccagttgcgcattatgtaaatccgctggctgacccaccagatgcagcaaatcgcccagttggataatggtatctgggctaggaacttttagggtttcttcgcgtttcagacggctgcagataattttgtcgccgttgagaatcggtacatctttaatggctaaatcatgcaggttagggttctcaacgcgaatattgatagtcttgatcagcgcgccgccattggtgcgactagactcgtgctgctgagcttctgtctcgacattgacgcggaaaataacccgcaacatccacatggtgaacaaaatcccgcaaatgccgaatggatacgccatcgcgtaactcatccccatctgatcgaccatttccattggtgtacccaggtcgcgcaaaatctgctgccctgcccccagcgctggcgtattggtaaccgcaccggagaaaatccccagcactaccggcagtggaatatcaaacagtttatgcaggatggcggtaaccagaccaccgatgatgacgatcagaacagcaaacaggttgaggcgtaatccggagacgcgcaaactggcaaagaagcccggccctacctgaatcccgatagtataaacgaacaggatcaggccaaattcctgaataacatgcagcatatcgctacttaatgtcatccccgcctgagaaacaaaatggccgacgatgatcccaccaaacagcacgccgccaatacctaatcctatgccgcgaaatttgacgttgccgataaacaaaccgacgactgccaccaaagccagaatactgaccgttaatgctatatcactcatcgtccatttctcttgagataacattttaattgctacggattatggctgaatcggtgaagcagatttgccttatagcgcacattatcacgggaaagaacgtgccgaaatatcttaaacagtcgaaatttaacgcattgttgagtaagtaagacaaaaaaagccccaccagaatggcggggcaaagagaatagctagttagctatttaacgcgggacgttcgctgatagcgatacgctgcgctgcgatgggttcaggctcattacgaattaaatcaatatgcagtaaaccgtttacgaaggttgcgccagagacttccatattttcagccagcgtaaagctcaggctaaatggctgattcataagcccttgatgcagccattttttctcttcttttggctgctccggcgtgccttttacgctcaggcgcgtaccttccagttgaatctctaaatcttcctgacggaaacctgccagcgcaagggtaatgcggtagtggttatcgtcgcttttctcaatgttgtacggcgggaagctctggctttcaccggcgttttgcagtgcgttggccagtttgtcaaaaccgatccattgacgcatcagtggggataaatcgaagttacgcatagtcatttctccttctaagaagcgagtaagtacctgcaaatccgaagattcgcatatgctccctgacggcgagcatggagatgtcaggccgcgccaggcggccttagggaattagttgatttcgatacggcgcggttttttcgcttccggaatcacgcgttcgagatcgatatacagcaaaccatttaccaggttagcaccacgaacatgaatgttctcagctaactggaatttgcgttcaaagttgcgttcagcgatgccctggtacagataggtgcgctctttttgttcgtcggcgtgagcacctttcaccaccagcagattatcctgggcggtaatttccagttcgctctcagcaaaaccagccacagcgatagcaatgcggtaatggttttcgtctaccagttcaacgttatacggagggtagccgccattactctggctctggttgttttctaagtggttaaacaaacggtcaaatccaatagcagaacggtaaagcggggataaatcaaagttacgcataatcaatagctcctgaaatcagcgagaatgtaagaccttccacaatggacaggtcaggtagccagaacacccatcaggcgcgtcctcatcggctacgatgtaaaaatgggtctggaaatgaacttttcaagccttatcagcggacttttttttgcagtttatggtctattgcatagactgagggggcagcacgaaacgttaaagtgcgatagccgccacagtgcgacgtaatgatgatgttattttcagcaagggatcgctataactcatcaggccaacacccacgatcaacagatgaatttattatgataagaaatgtgttgttagcgttcatgatatgcagcggaatgacattactcggaggatgctccagcgtgatgtcccataccggagggaaagaaggaacgtatcccggcacccgcgccagcgcaaccatgattggcgacgatgaaaccaactggggcactaagagcctggcgattctcgatatgccgtttaccgctgtgatggacacgcttttactgccgtgggatgtgttccgcaaagacagcagcgtgcgcagccgcgttgaaaaaagcgaagccaacgcgcaagccaccaatgcggttattccaccggccagaatgcctgataactgatttagcgatcagtttcggtgatccacagctggccgccttccatccacgccagccactgaccatccgggctgaagaccacggcgtccgcagaaggactattggcgtggtgttcggttaaatactcaacctcgccgctttgcgcatgggcacaagcaattcgattatccagcacaaagcccaaccattctccactcggatgccagttaaatgcagactgaatatccgttttgttatgggttaactggcgcggctcgccgccctgtgggctgataagccacagttgcacaatgccgttatcatctcgcattaaaaacgcgatttgtgtaccctgcggattacagcgcacccagtggcgcgggacgttgactaaccccggataagcccgatggtgggtaaaggttaaacgtcgctgcacgacgccacgcggtggcgcgggcagggttgtttccgttccgcttaacggcgcatcacctgccgctttccagccagcttcatcttgcggtaactcaacgataaacagctccggcactttctcgccctttgggctaagtgtgtcgccaataaatgccagcgcgtgatttcctacccatccttcttcataagcacgattgatttcatcactgccaggctgtggcgtgggcgtggttttgctcaccagcacgcaccagtggctaccgctgtattcacgcggatgctgcttttgtacgttgaccgggccaaacggcgcagcaacaccgacgtttcgcaaatccagcgccggatcgagttcatgcattacatggtcgttataggtaaagctcaccctttcaccgttcgggctaaagacatgcacatggctgccgccgcgcagcactcctggcgtatacggcgcggtaatatccatcgcatcaaggttactcatcttgccgccttcaacaatcactccgcgccgatgatggaagtcgtaatgccatgtttcatcaggattttccgggccgtggatgaaaacatatttctcactcttcggatgaacggtcaccacgccgacgtgtgcgccctgactcgcgcgatagataacctcgacctcgccggtatggatattcacacgctcaatggtctcgccggtaaagctcgcgccagaaggacgcacgtcaaataccagccactggctgtcgggcgtccaggtattggtattggtgagcaggtgattacggggagcaaaggttatctgtttcatggcgcggtcctgatacaaaacgggtcccgccatcatacttcacaaggacttcactttcagacaatagtcttttgccatcgtgatgaatgtgagtgaaaagatggaacatttcgacgtggcgattattggcctcggcccggcaggaagcgcgttggcacgaaagttagcaggcaaaatgcaggtgatcgcgctggataaaaagcaccagtgtggtactgaaggtttcagcaaaccctgcggcggtctgctggcaccggacgcgcagcgatcttttattcgcgatgggctgacgcttcctgtcgatgtgatcgctaatccgcagattttcagcgtcaaaaccgtcgacgtcgccgcaagcctcacgcgtaactaccagcgaagctatatcaatattaatcgccatgctttcgacttgtggatgaaaagcctgatccccgccagcgttgaggtttatcacgacagcctgtgccgaaaaatctggcgtgaggatgataaatggcatgtcatttttcgtgcagacggctgggagcaacatattaccgcccgctatctggtcggtgccgatggcgcaaacagcatggtgcggcgacatctctacccggatcatcaaatccgtaaatatgtcgctatccagcagtggttcgcggagaaacatccggtgccgttctactcctgcatctttgataatagcataactaactgttatagttggagtatcagcaaagacggttattttatctttggcggtgcctatccaatgaaagacggtcagacgcgtttcacgacgctgaaagagaaaatgagcgcctttcagttccagtttggtaagacggtgaaaagcgaaaaatgcacggtgctgtttcccagccgctggcaggattttgtctgcggtaaggacaacgcctttctgattggtgaagcggcgggatttatcagcgccagcagcctggaggggattagctatgcgctggatagcacagacattctgcgtagcgtgttactgaagcagccagagaagctcaataccgcttactggcgcgccacccgcaaactgcgtttaaaactcttcggcaagatagtaaaaagccgatgcctgaccgcaccggctttaagaaagtggattatgcgcagtggtgtggcacatattccacagttgaaggattaaccaacgcgcttcacatcgcccaccagcaggatataagagagcgcgccaatcaacgcgacggcggagatataaaccagtgcaggtgcgaaaccgtaaccctgcgccaggtaccccaccaccagcggaacggtgatgccgcccagaccaccggcgaagttaaacacgccgccggttaaaccaatcaggcgcatcggtgccagagaagaaaccaggctccaggtaatgctagcaaaaccgttaccgaagaatgccagcgccatcaggcacataatcatcatcggatcgttagtgtagttagcgcccataatgcaggtggagatcagcaagccgcagataatcggcgttttacgcgcaaagcccagactaaagcccttacgtaccagcagatccgctacccagccagagagcaggacgccgacaaacgccgcgaggaatggcaccgtggtcataaagcctgctttcagcgccgtgattcctttttcctgggttaaatagttcgggaaccaggttaagaaaaaccacagtgtagaagccaccgcaaattgcccaagataaacgccgatcagtttacgatggaacaccagtttccagtctttggctgttaacggctgacgcgcctctttcttcaccggcgcatcaccatccaccagaccgccgccatcacgaatgtaatccagttcagctttgctgatacctttggtcaggcgcggcggctgataaaccttaaaccaaatcaggctccagataatgccgataccaccagtgacaatgaacacccagtgccagctcaacatctcctgaatccagatcagcagcggcgtcagaaacgccagaccgacaaactgaccagacgtataaaaaccaacggcagaagcgcgttcatgttccgggaaccagctggtcaccatccggttattggtcgggaaagcaggcgcttcgaaaataccggttatcgcgcgcagaccaattaaactcattaagcccgtggcaaagccctggaataaagtcgccacactccagccaaatatcgcaataaaataagtcacgcgagaacctacgcgatctaaaaaccaaccgccggggatctgacatagcgtataaagccaggcgaaggcgctaaatacatagcccatttccgctttggtaatgccgaactcttcctgaatatgggcggaagccacggccaggttggcgcggtcgacataacaaatgactaccgtaataaagatcatcaccagcgtcagataacgccgacgccccggctttgctgcattaacgggaatatccatagcgagctttctccagattttgggcatagcgaagccgctcaccatgccctgtaatttacagagggttatatttttgtattgctgttttagtgcccgatgaggggcttacgtggcaggaattaccactctgctacgctgttatcttcatgacgccagagcggattacgccagtccggggcatttttactgaactcaatcactttagcttcgtcgatttccacgcctaagcccggtttcgttaacggtttaaagaagccgccgaccatgctgaagtcttctttgtttttcacaaagtcgagtaactccgcgcctttgttgtaatgaattcccatactttgttcctgaagtacggcgttataggaaacaaagtcgatatgcaggcaagccgccagtgcaatcggtccgagcggacagtgcggcgcaagggtcacgtcataggcttctgccattccggcgattttgtagcattcggtaataccgcccgcgtgggagagatccggttgcagaatgctaataccacctgcctccagcacgcgtttaaaatcgaagcgactgaacatgcgttcacccgccgccagtggaatatgcgtttgtgccgccagtttcgggtagtattcggcttgttccgccagcaccggctcctcaataaacagcgggcgatacggctccagttctttaatcagcactttcgccatcggcgcgctgacgcgaccgtggaaatcaagaccaaactcaatctgattgccaaaagcttcacgaatttgtgccacggtgttaaccgccgcatctaccgcgcgggagttatcaattagccccagttcttcacaaccgttcagtttgaaggtatcgaagccgatttcgcgtagcgttttaatgccgtcgataacatccgccggacgatcgccgccaacccaactgtaggctttaattttgtcgcgaaccaggccgcccatcagttgccagaccggcgcattcagcactttacctttgatatcccataacgcctggtcaatcccggcgatggcgctcatcaggatcggaccgccgcgatagaatccggcgcgatacatcacttgccataagtcattgatgcggcttggatcctgaccaatcaaatagtcacccagctcgtgaactgccgcttccaccgtacgggcgcggccttcgatcacgggctcgccccaaccgaccacgccttcatcggtttcaattttcaggaacatccagcggggaggtaaacgatacgtggtaattttggtgattttcattgcactgcctctcgatacgccttaacaaatgctgctgcctgctgcgcggtgcgctctacggattgcccggcgcgatagagatcgctgcctaagcccgcccctgcacaacctgcgtctatccactgcgccaggttttctggcgtcacgccgccaacggcaaagactgcgatgtcgcttggcaataccgcttttaacgctttgatgtattgcggaccaaaagcgctactcggaaatattttcagcgcctgcgcgcccgcttcgagcgcggtaaaggcttcggtcgccgtcgcgcagccggggcagacggtcatgccgtagcccaccgcacggcggatcacttcactatggatattgggcgtaacgatgagctgacagcccatcctggcgagcgcatcgacctgttcaggtttcagtaccgtacctgcgccaatcaacgccttgtcgccgtacgcatcaacgatggcgggaatgctttgctcccattgtggggaattcagcgggatttcaaccgcgtcgaacccggcgtcaatcaccgcgccaacatgcgccagcgcctcgtcgggcgtaataccgcgcaaaatggcgatcagcgggagtttagtttgccactgcatgagcgatgctccttataccagcctgaaatgccgtgtcgcccgccaccgccgtcacgtcgcaacccatcgcctgaaaggcttgctggtagcgcgcggtcaggcttgttccggcgacaagggtgatggcgtgttgatgggccacatagtcgcgcatactggcgacctctgcgccaatcaacaaaccagagagaaattcgctgacctgttcgcggggaagtgttcccagcacatggctggcgcgaacttcaaaaagctgcggcaatatggcgggcgtattaagaccacgctcaaggccagctgtgaaggcatcggcagagttttcctgcggcggcaaacctgcgccaatcaaactgtgatttaacagtaaatgatgtaattcaccggtcatcacggtgcgaaaatcgttgatttgctggctatcggcctgcacccatttgcaatgggttccgggcatgacataaagagaggaaggagccagagctcgcgcgccgatcaattgtgtttcttcgccgcgcatcacattgtggttatcgtcatgagagacacataatccgggaataatccagatattgtcgccaacactcgttaattgttcgccaatagagctaaaacaggcaggaacagataaatacggtgcaactttccagccgacgttgctgccaaccattcctgccattaccactggcgttttctcttcacgccagtcggtcgtgacttctgctaacaccgcagccggagattttccgttcaggcgcgtgacgcctgcttcactttgcctgctctccaggcagtggtcgccctgataaagccaggcgcgcagattggtgcttccccagtcaattgcgatgtagcgagctgtcatgtgatttcctttaaccttcgtgtgctgctggcgatcatggtaagcgccgcctgctctgccgcatcgccgtcctgatgtcgtatcgcatcgaacagcgccttatgttcctggagcgtttgcggcatgttggcctcatcgcccatccaggttcgttcaaaaaccgcccgctgcaggctactgatcgcaatgctaagttgctgtaacaccgggttatgcacgctctgcagcaccgcctcgtggtagcgaatatccgcttcgttaaacgcttcgcggtcctgattgttggcaatcatctcgttcagcgcgctttcaatctgcgccagatcgctggaagtcgcgcgctctgctgcccaacgggcaatcgccggttccaccagatttcgcacttcgctcatggcactgataagccgtgggtcgtagtcattttccagcacccattgcagtacgtcagtgtcgaggtaattccactggttacgcggtgccacaaacgccccgcgataacgtttcatttcaatcagccgcttcgccatcaggctacggaacacctcacggatgatgttgcggctggttgcaaactcctcacagagttccgcctcagccggaagcgggctgcctggcacgtatttgccgtgaacgatctgtttacccagcgtaatgacaatgcgatcggttttattgagagtcatggagagtccttgtgctctgtatgttcttctctactttaccccgatcgatgcataacgcggcaactttgtagtaccagcgtgatgacgttcgcgtttgccgtgcgtgtaatgtagtacaaacttatattgttgtactacaatttagatcacaaaaagaacaatgcataaaaaaatgacatgcgtcgggcagaaatctgaaaagggatatcaggcgctaaacaggagggaaagaagagtatgctttcaacggcttagctactcgtttaaaggattaatcatgaagttgaattttaagggattttttaaggctgccggtttattcccactggcgctgatgcttagtggctgtatcagctatgctctggtttcccataccgcaaagggtagtagtggaaagtatcaaagccagagtgacaccatcactgggctaagccaggcaaaagatagtaatggaacaaaaggctatgtttttgtaggggaaagcctggattaccttatcactgatggtgccgatgacatcgttaagatgctcaatgatccagcacttaaccggcacaatattcaggttgccgatgacgcaagatttgttttaaatgcggggaaaaagaaatttaccggcacaataagcctttactactactggaataacgaagaagaaaaggcactggcaacgcattatggttttgcctgtggtgttcaacactgtaccaggagtctggaaaacctaaaaggcacaatccatgagaaaaataaaaacatggattacagtaaggtgatggcgttctaccatccatttaaagtgcgattttatgaatactatagtcccagaggcattccggatggtgtttccgcagcattactgccagtgactgttacgctggacatcattactgcaccgctgcaatttctggttgtatatgcagtaaaccaataatcagtaagcgggcaaacgcgtttatgctgtttgcccgcccacagattaattcagcacatacttctcaatagcaaacgccacgccatcttcaaggttagatttggtgacaaagttcgccacttctttcacactaggaatagcgttatccatcgccacaccgacgcctgcatattcaatcattgcgatatcgttttcctgatcgccaatcgccatgatttcttccggtttaatacctaacacgtcggccagacttttcacccccgtacctttgttaacgcgtttatcgaggatttcgaggaagtacggcgcacttttcagcacggtatatttctctttcacttcctgcggaatacgcgcgatagcctggtcgaggatggcgggttcatcaatcatcatcactttcaggaactgggtattggggtccattttctccgcttcgcagaacaccagcggaatggtggcaacgaaggattcatgcaccgtgtagtagctgatatcacggttggcggtgtacagcgtggtgcggtccagggcgtggaaatgagaaccgacttcgcgagagagtttttccaggaaacgatagtcgtcatagctgagagcagtttgcgccacggtgctaccatcagcggccttctgtaccagcgcgccgttataagtaatgcagtagtcgcccggctgttccatatgcagctctttcaggtagttgtgcacacctgcatacgggcgacccgtcgttagcacgacattcacgccacgggcgcgagctgcggcaatcgcatttttaacggcgggactaatggtgtgatcgggcagcagaagggtgccatccatatcgatagcaatgagtttaatagccatgagttccccaggtagattggttcctgacccatgctaacgcgattccgctcaaaaatcagtacaacacccgagggaaaagggggatgcaacgcgcgttgcgtgctccctttttgcttagcggaagagtttccctttcagcagttccatgcctgcggaaagcagatcgttattggcttgtggactcacttcaccttgcggactgagcgcatcaataatcttcggcaattgttctgccagtaaactggaagctgtactggtatccacgccaagtttttgcccgagatcggacaccgcatttgtgccgagcgcgctttccagttgctcgccactaacgctttgattgccctgttgattactcagccaggtactgagaatggcccctaagccgccactttgcagtttttccagcagcacctgaatgccgccctgctcctcaacccaacttaaaatagcctgatatttccccgcatcgcctttcagaaaggcaccgacaacttcatcaaaaagccccatgataatcacctgtaaagcgttacgtgttgacccaaaaagtatagatttgcgggatgataattgcggattgcagaaataaaaagggcggagatgatctccgcccttttcttatagcttcttgccggatgcggcgtgaacgccttatccggcctacaaaatcatgaaaattcaatacattgcaagattttcgtaggcctgataagcgtagcgcatcaggcacgctcgcatggttagcgccattaaatatcgatattcgccgctttcagggcgttctcttcaataaacgcacggcgcggttcaacggcgtcgcccatcagcgtggtgaacaactggtcggcagcaatcgcatctttaacggtaacgcgcagcatacgacgactttccgggtccatagtggtttcccacagctgttccgggttcatctcgcccagacctttataacgctggatggagaggccgcgacgggactctttcaccagccagtccagcgcctgctcgaagctggctaccggctgacgacgctcgccacgttcgataaacgcatcttcttccagcaagccacgcagtttctcacccagcgtgcagatacgacgatattcgccaccggtgataaactcgtgatccagcggatagtcagtatccacaccgtgggtacgcacgcgaacaatcggctcgaacaggttttgctcagcattggtgtgaacatcaaacttccactggctgccgtgctgttctttgtcgttcagttcgctgaccagcgcgttcacccagcgggtaacggtctgctcatcagaaaggtcagcttccgtcaacgtcggctgatagataagctctttcagcattgctttcggataacgacgctccatacgattgatcattttctgcgtcgcgttgtactcagataccagtttctctaacgcttcgccagccaatgccggtgcactggcgttggtgtgcagcgttgcgccgtccagcgcgatagagatctggtactgatccatcgcttcgtcgtctttaatgtactgttcctgcttgcctttcttcactttgtacagcggcggctgagcgatgtagacgtgaccgcgttcaacgatttccggcatctgacgatagaagaaggtcaacagcagcgtacgaatgtggctgccgtcgacgtccgcatcggtcatgatgatgatgctgtgataacgcagtttgtccgggttgtactcgtcacgaccgataccacagccaagcgcggtgataagcgtcgccacttcctgagaagagagcatcttatcgaagcgcgctttctcgacgttgaggattttacccttcagcggcagaatcgcctggttcttgcggttacgcccctgcttcgcagagccgcccgcggagtccccttccaccaggtacagttcggaaagcgccggatcgcgttcctggcagtctgccagtttgcccggcaggcccgctaagtcgagcgcacctttacggcgggtcatttcacgcgcgcgacgcgccgcttcacgggcacgggcagcatcgataattttgccaaccacgattttcgcgtcggttgggttttccagcaggtattctgccagcagttcgttcatctgctgttcaaccgcgcttttcacctcagaagaaaccagtttgtctttggtctgggaggagaatttcgggtccggcactttcacggaaacgaccgcaatcaggccttcacgcgcatcgtcaccggtggcgctgactttggcttttttgctgtagccttctttgtccatgtaggcgttcagggtacgggtcatcgccgcacggaagcctgccaggtgagtaccgccgtcacgctgcggaatgttgttggtaaagcagtagatgttttcctggaagccatcgttccactgcaacgccacttcgacgccaataccgtctttttcagtggagaagtagaagatattcgggtggatcggcgttttgttcttgttcagatattcaacgaacgccttgatgccgccttcatagtggaagtggtcttctttgccgtcgcgcttgtcgcgcagacgaatggaaacgccggagttgaggaagctcaactcacgcagacgtttcgccagaatttcatattcgaactcggtcacattggtgaaggtttcgaggctgggccagaaacgcaccatggtgccggttttttcagtctcgccggtaaccgccagcggggcctgcggtacaccgtgttcgtagatctgacggtgaattttaccctcgcgctggataaccagctccagtttttggctcagggcgtttactacgctaacaccaacgccgtgcagaccgccggacactttataggagttatcgtcaaatttaccgcctgcgtgcagaacggtcatgatcacttccgccgcgcttacgccctcttccgggtgaataccggtcggaatgccgcgcccgtcatcctgtacagagacagagttatcggcgtgaatggtgacgataatttctttacagtgacccgcgagcgcttcgtcgatagcgttatctaccacctcgaataccatgtggtgcagaccggtgccgtcatccgtgtcgccgatatacatacccgggcgcttacgcaccgcatccagccctttcaggactttgatactggaggagtcataagaattgctcatcaacgtttctcgctcatttatacttgggttaatccgttattttacccttttccacggtaaacatcttgctattttcgtcgctcatgtctataacgtgttcagcactgatcgcgctgacaaagacctgactttgcgtcgcttttaagcggctggcaagcagcccgcgacgctcatcatcaagctcagaggcaaaatcatctatcaggtagagacaccgccgcccgctttcacgggtgaggaactctccttgcgccagacgtaaggcgcacatcaacagcttaagctgcccacggcttaaggtatcttccaccggcgcaccgtcggcgcgaatgcgtaagtccgctttgtgcgggccgtgcgcggtgtaggttagctggcgatcgcgttcaaaattacgttccagcacctcagcatattctgtctctttctcccagccgcgctggaaagagaaagtcagagaaaactcagggagaaattgcttacaggtatcagccatatcggccgcgataccggcgctatactccgcgcgccaggtgctgatttgctccgccagcgggatcagctctttatcccacgggcgtagctgttcgtaacgtgtcacctggcgcagcgccgcattgcgctgcttgagcaatcgcttgagattgctccaggcggtgaaaaatccgggttcgttgtgaaagcatccccagtcgaggaatgctcttctgtatttggggccgccgttgagtaaagtaaacccttctggcgttatcaactgcattggcatcaggtgcgccagttccgcgaccttatgcccgtctgtaccgtcgatgcggactttgctgtcgccctgtttgtctttggttaagccaatcgctgtctcgcgctcttcgccctgtaatcgcccgtggagaacaaacgcctcctgctcatggcgaatgacgcgaccaatctgcaaactgcgaaacgcccgaccatggccgagcgtatagatggcttccagcacgctggttttgccactgccgttggcacctaccagaaagttaaagccgggagataaggcgagatccgcggtttcaatgttgcggaaatcgcggatcaacaagcgggtgagggacattacagtctcattggcatgacaacataagccgcgctctggctggccgcatcttcaatctgcacgctggaaacgctatcggtcagcatcatgcggacgttttcgcatttcagcgcgttcagaacatccagcacataactgacgttgaagccgatttccatctccgcaccgctataggtaacgtcgaggatctcttccgcttcttcctgttccgggttgttggcggtgattttcagctggttttcgctgacataaagacgtacgccgcggaatttctcgttagagagaatcgccgcgcgagcaaacgcctgcttgagcagatcgcagccagcttccagatgtttgtccgggttcttcggcagaacgcggcgataatccgggaagcgaccatccaccagtttggaggtgaagataaagtcgccaacgtgggcgcgaatgttgttgctgccaatctgtacgcgcagcggattgtcgccgccgtcgagcatacgcatcagttcaatcacgcctttacgcggtacgatcacgctatggcttggcaaagattgaccaattggcatactacagaccgccagacggtggccgtcggttgccacggtgcgcagttcttcaccttcggtttcaaacagcataccatttaagtaatagcgaacgtcctgatgcgccatagaaaactgggtcgcttcaatcagacgcttcatcgttgcctgcggcagggtaaattcgacttcactctgccagtcatcgaggttcgggaaatccgccgctggcagggtagacaggctaaaacggctacgcccggagcgtaccagcatccgttcaccttccagctgcacggcaatttccgcgccttcaggcagaccacggcagatatcaaagaatttgcgcgccggaacggtcgtcgctcctggctcgtgtggctgaaccagcgcaacacgtgccaccatttccatctcgagatcagtaccggtcaggctcaacgtaccgtcagcaacctgtaacagcagattaccgagaatcggtagcgtaggacgaccacctaacggaccgctcacctgttgtagcggttttaataaatgctcacgttctacggtaaatttcataggtttagctactcaatgttctgattaaattactaaaatcttctttgatatcgtggctctcttcacgcaactgctcgatcttacggcaggcatgaagcaccgtcgtgtggtcacggccaccaaacgcatcgccaatctccggcagactgtggttagtcagctctttcgccagcgccatcgccatctggcgcggacgcgccacgctgcgggatcgacgcttggaaaggagatccgcgactttgatcttgtagtactccgccaccgtcttctgaatattgtcgatggtgaccagtttttcctgcaatgccagcaagtcgcgcagcgcctcacgcacgaagtcgatggtgatcgcccgtccggtaaagttggcattggcaatgacgcggttcagcgccccttccagctcacgtacgttagatcgtagacgcttggcgataaagaacgccacttcgcccggcaaacgaatgtcgttttcgtcggcctttttcatcaggatcgccacacgggtttccagctctggcggttcgatcgccacagtcagtccccaaccgaagcgggatttcaaacgatcctcaacgccgttgatctctttcggatagcgatcgctggtgagaatgatctgttgattaccttccagcagggcgttgaaggtgtggaaaaactcttcctgagatcgttctttattagcaaaaaactgaatatcgtcgatcagcagtgcatctacggaacggtagtagcgtttaaactcttcgatcgcgttgttttgcagggctttaaccatgtcctgaacaaagcgctcggagtgcatataaaccactttggcattcggcttgcgcgccataatgccgttacccaccgcatgcagcaggtgagttttacccagacccgtgccgccataaaggaacaacgggttataggcaccgccagggttatccgccacctggcgagccgccgcgcgcgccagttggttagatttaccttcaacgaagttatcaaacgtgtgtttgacgtttacgttagaacgataggtcggttctgccggggccgggacgttatcccaaccactgcgcgtagaaggcgcagcacgttgcggctgcgtttgcgccacctgtgcaggggccgcgacgttgctcgtcactgccgcttgtggcgtttgcgtcaccggtttggtgccgacttcaaaacgcagctgtggggcatccgctccgcagaaactggttagcagtccattgatattattaaggtacttgtcccgtacccaatcgaggacaaaacggtttggcgcgtacagggccagcgtgttatcgctcagttccgcctgcaatgggcgtatccacatactgaattctgtggctggtaactcatcctgcaatcgggcaagacactgctgccaaaggctaagactcacggcggactccactcgaacaaaagtcgataatgactaaggctgaaacattcatgattgttgacgtacgtcgaaaagaccctgcttgagggtgacgcacgaaccgctgtctgcggttatatgcccgatcaagatcctgcaaaacgatcgggaccgcggatcatagcctaaactgcgcaagagatcttctgtttctcacagattttcccgatttatccacaggactttccagaactcgctaagtgtaaacgatcctgccgcgaggcgggcacgatttacgccgcatattggaaaatttaatgaccatagacaaaaattggcttaatcgatctaataaagatccaggacgatccttgcgctttacccatcagcccgtataatcctccacccggcgcgccatgctggtttccactggtgtgaggtcgtacattttccctgcgaaaaggtgcggaaaagcgcggtaaataaggaaagagaattgactccggagtgtacaattattacaatccggcctctttaatcacccatggcttcggtgtccatcgtttcatttttcggcggatatccaataaagccattgaatttattcaagtttaggtagaaatcgccatgaaacgcacttttcaaccgtctgtactgaagcgcaaccgttctcacggcttccgtgctcgtatggctactaaaaatggtcgtcaggttctggcacgtcgtcgtgctaaaggccgcgctcgtctgaccgtttctaagtaataaagctaacccctgagtggttaagctcgcatttcccagggagttacgcttgttaactcccagtcaattcacattcgtcttccagcagccacaacgggctggcacgccgcaaattaccattctcggccgcctgaatagcctggggcatccccgtatcggtcttacagtcgccaagaaaaacgttcgacgcgcccatgaacgcaatcggattaaacgtctgacgcgtgaaagcttccgtctgcgccaacatgaactcccggctatggatttcgtggtggtggcgaaaaaaggggttgccgacctcgataaccgtgctctcagcgaagcgttggaaaaattatggcgccgccactgtcgcctggctcgcgggtcctgacttaatcggaagcgttggaaaaattatggcgccgccactgagccctggcagccgggtcctgatagccctcattcgggtctatcaacgcctgattagtccgctactcgggccgcattgtcgtttcactccaacctgtagtagctacggaattgaggcattgcgcaggtttggagtgataaaaggcagttggttgacggtgaaacgcgtattaaaatgccaccctttacaccctggtggtgacgatcccgtcccgcccggaccatttgataccagagaacactaacgatggatagccaacgcaatcttttagtcatcgctttgctgttcgtgtctttcatgatctggcaagcctgggagcaggataaaaacccgcaacctcaggcccaacagaccacgcagacaacgaccaccgcagcgggtagcgccgccgaccagggcgtaccggccagtggccaggggaaactgatcagcgttaagaccgacgtgcttgatctgaccatcaacacccgtggtggtgatgttgagcaagctctgctgcctgcttacccgaaagagctgaactctacccagccgttccagctgttggaaactagtccgcagtttatttatcaggcacagagcggtctgaccggtcgtgatggcccggataacccggctaacggcccgcgtccgctgtataacgttgaaaaagacgcttatgtgctggctgaaggtcaaaacgaactgcaggtgccgatgacgtataccgacgcggcaggcaacacgtttaccaaaacgtttgtcctgaaacgtggtgattacgctgtcaacgtcaactacaacgtgcagaacgctggcgagaaaccgctggaaatctccagctttggtcagttgaagcaatccatcactctgccaccgcatctcgataccggaagcagcaacttcgcactgcacaccttccgtggcgcggcgtactccacgcctgacgagaagtatgagaaatacaagttcgataccattgccgataacgaaaacctgaacatctctagcaaaggtggttgggtggcgatgctgcaacagtatttcgcgacggcgtggatcccgcataacgacggtaccaacaacttctataccgctaatctgggtaacggcatcgccgctatcggctataaatctcagccggtactggttcagcctggtcagactggcgcgatgaacagcaccctgtgggttggcccggaaatccaggacaaaatggcagctgttgctccgcacctggatctgaccgttgattacggttggttgtggttcatctctcagccgctgttcaaactgctgaaatggatccatagctttgtgggtaactggggcttctccattatcatcatcacctttatcgttcgtggcatcatgtacccgctgaccaaagcgcagtacacctccatggcgaagatgcgtatgttgcagccgaagattcaggcaatgcgtgagcgtctgggcgatgacaaacagcgtatcagccaggaaatgatggcgctgtacaaagctgagaaggttaacccgctgggcggctgcttcccgctgctgatccagatgccaatcttcctggcgttgtactacatgctgatgggttccgttgaactgcgtcaggcaccgtttgcactgtggatccacgacctgagcgcacaggacccgtactacatcctgccgatcctgatgggcgtaacgatgttcttcattcagaagatgagcccgaccacagtgaccgacccgatgcagcagaagatcatgacctttatgccggtcatcttcaccgtgttcttcctgtggttcccgagtggtctggtgctgtactatatcgtcagcaacctggtaaccattattcagcagcagctgatttaccgtggtctggaaaaacgtggcctgcatagccgcgagaagaaaaaatcctgattcggtgagttttcgctaaaataagggcggtcagttgaccgccttttttcttttcgtagggcggataagcaccgcgcatccgccacacaaagcaacaggaacatcatgagcgataatgacactatcgtagcccaggccacgcctccgggacgtggcggcgttggcatcctgcgcatctccggcttcaaagcccgtgaagttgccgaaaccgtgctgggtaaactgcctaagccgcgctacgccgattatcttccgtttaaagacgccgacggcagcgtgctcgatcaggggattgcgctatggttccctggcccgaacagcttcaccggcgaagatgtgctggaactgcaaggtcatggcggtccggtgatcctcgacctgctgttaaaacgcattctgaccattcccggcctgcggattgctcgccctggtgagttttccgaacgcgcgtttcttaacgataaacttgacttagcccaggccgaggcgattgccgatcttatcgacgccagtagcgaacaggcggcccgtagcgcacttaacagcctgcaaggcgcattctccgcacgggttaatcatctggtagaagccctcacccacttgcgcatttacgtcgaagcggcaattgatttccccgatgaagagatcgatttcctctccgacggaaaaattgaagcccagctcaatgacgttattgccgatcttgatgcagtgcgtgctgaagcacgtcagggtagtttgttgcgcgaagggatgaaagtggtgattgccggacgtcctaacgccggtaaaagcagcctgttaaacgcgctggcggggcgtgaagcggcaatcgtaaccgatatcgccggaactacgcgtgacgtgctgcgtgagcatatccacattgacggaatgccgctgcatatcatcgataccgccgggctacgtgaagccagtgacgaagtagaacgtattggtatcgagcgcgcgtggcaggaaattgaacaggccgaccgcgtgctgtttatggtcgatggcaccacaacagacgccgtggatccggcagagatctggccggaatttattgcccgtctgccagcgaaactgccgatcaccgtggtgcgcaataaagccgatatcaccggcgaaacgctgggaatgagtgaagtgaacggtcacgcgttaattcgtctcagcgcaaggactggtgaaggcgtggacgtgctgcgtaaccatctcaaacagagcatgggctttgacaccaacatggaaggcggcttcctggcgcgtcgtcgccacctacaggcgctggaacaggcagcggaacatctacaacagggcaaagcgcaactgttgggagcctgggcaggtgaactgctggcggaagagttgcgtctggcacagcagaacttaagcgaaatcaccggggaatttactagtgacgacctgctggggcggattttctccagcttctgtattggtaagtaaccgcgcttacgaggccgcattctgactgtcagatgcggcttcgcttcattgttaccactcctgttattcctcaaccctttttttaaacattaaaattcttacgtaatttataatctttaaaaaaagcatttaatattgctccccgaacgattgtgattcgattcacatttaaacaatttcagaatagacaaaaactctgagtgtaataatgtagcctcgtgtcttgcgaggataagtgcattatgaatatcttacatatatgtgtgaccagtaaatggttcaatattgacaacaaaattgtcgatcaccgcccttgatttgcccttctgtagccatcaccagagccaaaccgattagattcaatgtgatctatttgtttgctatatcttaattttgccttttgcaaaggtcatctctcgtttatttacttgttttagtaaatgatggtgcttgcatatatatctggcgaattaatcggtatagcagatgtaatattcacagggatcactgtaattaaaataaatgaaggattatgtaatggaaaactttaaacatctccctgaaccgttccgcattcgtgttattgagccagtaaaacgtaccactcgcgcttatcgtgaagaggcaattattaaatccggtatgaacccgttcctgctggatagcgaagatgtttttatcgatttactgaccgacagcggcaccggggcggtgacgcagagcatgcaggctgcgatgatgcgcggcgacgaagcctacagcggcagtcgtagctactatgcgttagccgagagtgtgaaaaatatctttggttatcaatacaccattccgactcaccagggccgtggcgcagagcaaatctatattccggtactgattaaaaaacgcgagcaggaaaaaggcctggatcgcagcaaaatggtggcgttctctaactatttctttgataccacgcagggccatagccagatcaacggctgtaccgtgcgtaacgtctatatcaaagaagccttcgatacgggcgtgcgttacgactttaaaggcaactttgaccttgagggattagaacgcggtattgaagaagttggtccgaataacgtgccgtatatcgttgcaaccatcaccagtaactctgcaggtggtcagccggttagtctggcaaacttaaaagcgatgtacagcatcgcgaagaaatacgatattccggtggtaatggactccgcgcgctttgctgaaaacgcctatttcatcaagcagcgtgaagcagaatacaaagactggaccatcgagcagatcacccgcgaaacctacaaatatgccgatatgctggcgatgtccgccaagaaagatgcgatggtgccgatgggcggcctgctgtgcatgaaagacgacagcttctttgatgtgtacaccgagtgcagaaccctttgcgtggtgcaggaaggcttcccgacatatggcggcctggaaggcggcgcgatggagcgtctggcggtaggtctgtatgacggcatgaatctcgactggctggcttatcgtatcgcgcaggtacagtatctggtcgatggtctggaagagattggcgttgtctgccagcaggcgggcggtcacgcggcattcgttgatgccggtaaactgttgccgcatatcccggcagaccagttcccggcacaggcgctggcctgcgagctgtataaagtcgccggtatccgtgcggtagaaattggctctttcctgttaggccgcgatccgaaaaccggtaaacaactgccatgcccggctgaactgctgcgtttaaccattccgcgcgcaacatatactcaaacacatatggacttcattattgaagcctttaaacatgtgaaagagaacgcggcgaatattaaaggattaacctttacgtacgaaccgaaagtattgcgtcacttcaccgcaaaacttaaagaagtttaattaatactacagagtggctataaggatgttagccactctcttaccctacatcctcaataacaaaaatagccttcctctaaaggtggcatcatgactgatcaagctgaaaaaaagcactctgcattttggggtgttatggttatagcaggtacagtaattggtggaggtatgtttgctttacctgttgatcttgccggtgcctggtttttctggggtgcctttatccttatcattgcctggtttagtatgcttcattccgggttattgttattagaagcaaatttaaattatcccgtcggctccagttttaacaccatcaccaaagatttaatcggtaacacctggaacattatcagcggtattaccgttgccttcgttctctatatcctcacttatgcctatatctctgctaatggtgcgatcattagtgaaacgataagtatgaatttgggttatcacgctaatccacgtattgtcgggatctgcacagccattttcgttgccagcgtattgtggttaagtagcttagccgccagtcgtattaccagtttgttcctcgggctgaagattatctcctttgtgatcgtgtttggttcttttttcttccaggtcgattactccattctgcgcgacgccaccagctccactgcgggaacgtcttacttcccgtatatctttatggctttgccggtgtgtctggcgagttttggtttccacggcaatattcccagcctgattatttgctatggaaaacgcaaagataagttaatcaaaagcgtggtatttggtagcctgctggcgctggtgatttatctcttctggctctattgcaccatggggaatattccgcgagaaagctttaaggcgattatctccagtggcggcaacgttgatagcctggtgaaaagcttcctcggcaccaaacagcacggcattatcgagttttgcctgctggtgttctctaacttagctgttgccagtagcttctttggtgtcacgctggggttgttcgattatctggcggacctgtttaagattgataactcccacggcgggcgtttcaaaaccgtgctgttaaccttcctgccacctgcgttgttgtatctgatcttcccgaacggctttatttacgggatcggcggtgccgggctgtgcgccaccatctgggcggtcattattcccgcagtgcttgcaatcaaagctcgcaagaagtttcccaatcagatgttcacggtctggggcggcaatcttattccggcgattgtcattctctttggtataaccgtgattttgtgctggttcggcaacgtctttaacgtgttacctaaatttggctaaatccttcaagaagccagccattcgctggcttcttgcctctcaggaaatcacttatgtccaaatggcaactcgcctgatcctccttcaccacgtatgctttgcgtcaccttactatcaggacgctttagcccatgtcccgctttttgatttgtagttttgccctggttttactttatcccgccgggattgatatgtacctcgttggtttaccgcgcatcgccgccgatctcaatgccagcgaagcgcagttgcatattgcgttctccgtatatctggcggggatggcagctgcgatgttatttgccggtaaagtggccgatcgtagtgggagaaagccggtcgccatacccggcgcggcgctatttattattgccagcgtgttctgtagtctggctgaaaccagcacgttatttcttgcaggccgatttctacaggggttgggcgcaggctgttgttacgtagtggcgttcgctattttgcgcgacacgctggatgatcgacgtcgggctaaagtgctgagtttactcaacggtattacctgcatcattccggtgttagcgccagtgctcggacatctgattatgcttaaattcccgtggcagagtctgttctgggcgatggcaatgatgggcatcgcggtactgatgttgtctttgtttattttaaaagaaacgcgcccagcggcccccgcagctagcgataaaccacgagaaaatagcgagagcctgcttaaccgttttttcctcagccgtgttgttatcaccaccctcagcgttagcgtgatcctcactttcgtcaacacgagtccggtattgctgatggaaatcatggggtttgagcgcggtgaatacgccaccattatggcgctgaccgctggcgtcagcatgaccgttagtttctccacgccatttgcgctgggaatttttaagccacgtacgttgatgatcaccagccaggtgttattcctggcggcggggatcactcttgccgttagtccttcccatgcggtttctctgtttggtatcacgctgatttgcgccggtttcagcgtaggttttggtgtggcgatgagtcaggcgttagggccgtttagtttacgcgcgggcgtagccagcagcaccttaggtattgcgcaggtttgcggtagcagtctgtggatttggctggcagcggtggttggtatcggcgcatggaatatgctgatcgggattctgattgcctgtagcatagtgagcctgttgctgattatgttcgtcgcgcctggacgccccgttgccgctcatgaagaaatccatcaccacgcttgatctcaatctgctgctttgtctgcaactgctgatgcaggagcgcagcgtaaccaaagcggcgaagcggataaacgtgacacctagcgcggtgagtaagagcctggcaaagttaagagcgtggtttgacgacccgctctttgtgaacagtccgctgggtctgagccccacaccgctgatggtcagcatggagcaaaatctggcggagtggatgcaaatgagcaacctgctgctggataaaccgcaccaccagacaccgcgcggcctgaagtttgagctggcggcggaaagtccgctgatgatgatcatgcttaatgcgctgagcaaacagatctaccaacgttacccgcaggcgaccatcaaattacgtaactgggattacgattccttagatgccattactcgtggtgaagtggatatcggtttttccggtcgcgaaagccatcctcgcagccgggagctgttaagcagcctaccgttagccattgattatgaagtgctgtttagtgatgtgccctgcgtctggttacgcaaagatcatccggcactgcatcaaacgtggaatctggacaccttcttacgttatccgcatatcagcatttgctgggaacagagcgatacctgggcgctggacaatgtgttacaggagctgggacgcgaacgcacgattgctatgagcctgccggaattcgagcagagtctgtttatggcagcgcaacccgacaatctgctactggcgaccgcgccgcgctactgtcagtactacaatcaactccatcaactgccgttggttgctcttcctctcccgtttgacgaaagccagcaaaaaaagctggaagttccttttaccctgctgtggcataaacggaacagccataatccgaagatcgtctggttacgggaaaccattaaaaacctttacgcgagcatggcataaccgaatcgtatgaaacgcgacccaatttcacaataaaatgtaaaaaagttgtaataagcttgtctgaatcgaacttttagccgctttagtctgtccatcattccagtaaatgattactcttgtattcataatggaccattaagcatggagcgaaaaatggcgactcactttgcccgagggattttaacggaaggacatctgatttctgttcgtctcccctcccagtgtcatcaagaagcccgaaacattccccctcatcgtcaaagccgttttctggcgtccagaggtttactcgcagaactgatgttcatgctgtatggcattggcgaattgccggaaatcgtcaccctgccgaaaggtaaaccggttttcagtgataaaaatttgcctagcttttccatttcctatgccgggaatatggttggcgtggcgttaacaaccgaaggtgaatgtggcctcgatatggaactacagcgtgcgacgcgcgggtttcatagcccacacgcgcccgataaccacaccttttccagcaatgaaagcctatggatcagtaaacaaaacgatcctaacgaagcgcgggcgcagctcatcacgctgcgccgaagcgtgctaaaactaaccggtgatgttttgaatgacgatccgcgcgatctgcagctgctgcccattgccggacgcctgaaatgtgctcatgtaaatcatgtagaagcgttatgcgacgcggaagacgtgctggtgtggtccgtggcggtcacgcccacgattgaaaagctcagtgtctgggagttagatggcaaacacggctggaaaagcctgccggatattcacagccgcgccaacaatcctaccagccggatgatgcgttttgcccaactctctaccgtgaaggcttttagcccaaattgatagacaaccacaggagtcatcatgtctgaaaaattgcaggtggttacgttactggggagcctgcgcaaaggcagttttaatggcatggttgcacgtaccctgccgaaaattgctccggcgagcatggaagtcaatgcgttaccatccattgccgacattcccttgtatgacgctgacgtacagcaggaagaaggttttccagcaacggttgaagctctggcggaacagatccgtcaggctgacggtgtggtgatcgtcacgccggaatataactacagcgtaccgggtgggctgaaaaatgccatcgactggctttcccgcctgccggatcaaccgctggccggtaaaccggtattgattcagaccagcagtatgggcgtgattggcggcgcgcgctgtcagtatcacctgcgccagattctggttttcctcgatgcaatggtgatgaacaagccggaatttatgggcggcgtgattcagaacaaagttgatccgcaaaccggagaagtgattgatcagggtacgctggaccacctgaccgggcaattgaccgcatttggtgagtttattcagcgagttaagatctaaataaaaaacccgccagcaatcatgcatggcgggtttttaacgcgctatcgattttagtgagcgtcgataaagacaatcttcaggataaacagcagcgcaacgatgattacgcacgggcttagatcacgcagacgtccggtaccgattttcatcacgcagtaggagataaagcccagcgcgataccttcggtaatgctgaagctgaacggcatcatcacggcggtaataaacgccggaacagattcagtaagatcctgccagttcacgcgtgccagactggaagtcatcagcacgccaacgtaaatcagcgcaccagctgcagcgtagcctggcaccatccccgccagcgggctcagaaagataaccagcaggaacagcagaccaacaaccactgccgtcagaccggtacgaccgccaacgcttacgccggaagaggactcaatataagccgtaacggaagaagtaccgataaagctaccggtcacggaagagatactgtcgacatacagcgcctgcttcatgcgcgggaatttccccttctcatccgccagacctgctttatcggtcacgccaatcagcgtaccggaggagtcaaacaagttgaccaacatgaaagagaaaatcacccctgccagcccgaggttaaagctcccggctaaatctacatgacccacaactgtcattacgctcggcggcgcagaaacgatgccattgtagtgcacatcacccagcatccagcccagcagcgtcgtcaccacgatagaaaccagcaccgctgcgtgaatgttgcggctggccagaatagcaatgatgaagaagccgaggatacccagaagtacgctgtgagaagtcagattaccgatgctcaccagcgtttccgggttagcgacaatcacacctgcgtttttcagccccatcatgccaatgaacagaccgataccgctggtaatacccacacgcagactcaccggaatgttggctatcatccagtagcgaacgcggaaaatcgtcagtaacagcagacctatcgcgccccagaagattgcgcccatcccgacctgccacggcaagcccatcgcctgtacaacgacaaaagcgaagaacgcattcaggcccatagcgggtgccagtgcaactggcaggttagcaaacagtcccatcataatactgccgaatgcagcgatcagacaggtagtgacgaagacggcgctggtatccatgccagcaacgccaagaatttgcgggttaacaaaaacgatgtaaaccatcgtcaggaaggtggtaaaaccggcgatcacttcggtccgtgccgtcgtgccatgttcgcgcagtttaaacacgcgttccagcatcccctgaccagaagtctgggtggtatgttgatgactcattatctatttccgaacaaggagggaaaatccgtcgctatcgtataccaaaatgcgacaataggcgcgtttgtgagagacttttttattggatttacttatacggcaacgattgcgttgcgcaaatcggctctacgaaaacgttaaactgattaaaaaggaaaggcatgtcccggatagaagcggtatttttcgactgcgacggtacgctggtcgacagtgaagtcatttgctctcgcgcatatgtaacgatgtttcaggaatttggtattacgctcgatcctgaagaggtattcaaacgtttcaaaggtgtaaaactgtacgaaattatcgatattgtttcccttgaacatggtgttacgttagcgaaaacagaagctgaacacgtttaccgtgcagaagtcgctcggctgttcgatagtgaactggaagccatcgaaggggctggagcgctcctgagtgcgatcactgcgccaatgtgtgtggtatctaacggcccaaataacaaaatgcagcattctatgggcaagctgaatatgttgcactacttcccggataaactgttcagcggctacgatattcagcgctggaagccagacccggcgttaatgttccatgcggcaaaagcgatgaatgtaaatgtagaaaactgcattctggttgatgacagtgttgccggtgcacaatctggtatcgacgcaggtatggaagtgttctacttctgcgccgacccgcacaataagccgatcgttcacccgaaagtcaccacctttacccatcttagccagttacctgaactgtggaaagcgcgtggttgggatattacggcataattcttcacactcccttcacttaccccgcttaaattggcgctcaaaggtaagtaaagggagtttgatatgtctgttagtcgtcgggtaatacatcacggactttattttgcagttttaggaccgttaattggtgttctgtttcttgtcctctacatattcttcgcaaaagaaccgctggttctttgggtgataatacatccaatttttctcttattgagcataactacgggagctattcctgcgttgttaaccggtgtaatggttgcctgtctgccggaaaagatcgggagtcagaaacgttatcgttgtctggctggtggcataggtggcgtcgttatcaccgagatctattgtgcagttattgtacatattaagggcatggcttccagcgagttgtttgaaaacattctttctggtgacagtctcgttgtccgcatcattcctgcattgctggcaggtgtggtgatgagcagaatcattacccgtctacccggattggatattagttgtcctgaaacagactctttaagttaagcgggatactttatctttgggctactcaaaagcagacaggatgtttctatgactcaaaatatcaggccgttaccccaattcaaatatcatcccaagccactggaaacaggcgcatttgaacaggataaaaccgtagagtgcgattgctgtgaacaacagacgagtgtttattacagcggtcccttttattgcgttgatgaagttgaacatctctgtccgtggtgtattgcggacggttctgctgctgaaaagtttgcaggtagttttcaggatgatgccagcatagaaggtgttgaatttgagtatgatgaagaggacgaatttgccggtattaagaacacatatcctgatgaaatgctgaaagagttggttgaacgcacgccaggttatcatggatggcagcaggaattctggctcgcgcattgtggcgatttctgtgtttttatcggctatgtgggctggaatgatataaaagatcgcctcgatgaatttgccaaccttgaagaagattgtgagaatttcggtattagaaattctgatctagctaaatgcctgcaaaagggtggtcattgtcagggttatctcttccgctgtctccactgcggcaagctgagactgtggggtgattttagctaattatttaaataatgagaacaggccggagcgtaattcacacatccggccttatttcttaagcttaaccgagtgctaattctgcggcagcggctttatcagcgattaccatcaggctaggatgcagctgcaacacggaagctggaacatcttcggtaaccggaccttgcagaacatttttcagtgcctgcgctttacccgcgccgctgacaattatcagcaagtttttcgccgccatgatgcttttcggccccatcgtcacgtagctgtcaggcactaagctaaagtcgccgcccaactcgccatgcgccacaatatcaaccatctctccctggatcgggaactccacggtttgctcatggaaatgggtcgtattcggcaaattgccacaaaaatgaccatctgcacctaatcccagcaccaccaaatccagtccgccttcacgcgccagtttctgatcatgctcgcggtagttatcaatagtgagcttctggatattctcttctttgatccccgcaggggtgaaaaacagattacgcagattggtaatcgttacgccttctccctctttgccgcgaaatggaatttcatcaaaattatagaaatagcagttatcgtaccagggcttacctttaaccagggtggtgaggtattcatacatgcctttgggcgtgctaccggcggtaattgccaggttaacacgacgcgtcttgctcatataaccaagcagatggtgtgccgcgacacggctcatttcctggtaatcttcggtaatgattaatttcatcttaatgccttattttatttaaataatttctgtacaaaggctgcataggctggtcgccagacatccatttcatggttcagacccggatattcctggtaatcaaagttaatttttttctgctcaagctcagttttcagcccggcgatatccttgccggttacgacatctttatcccccacaaccacagtaaaattacgtagttgctggttgatagctgccggatcgttcagtcgggccgcgacaccttcatccggtacggttgtcgtggtaacaccactgaatgtggccagccagccaaagctttccagatgattcattccggaaaccagcgcctggtacccgccttgactaagccctgccagcgcgcggccatcggcatctttacggacattaaaacgcttgctaatcagcgggataatatcgttcatcagttcgcgatctgccgctttagcattcagcggataaaagactttacgtctttcctgaggcacgaaatcttcgggaataatgcccttcgcatcggtttctgtatccgggatcaccaccagcatcggtttaattttcccttcagcaagcaggttatccatgatttgcgggatacgcccctgatcgatagcggaacgtccggtatcaccaaagccgtgatagaaatagagcactggcaaaggctcgcccatgccggtgtatcctggcggggtccagacatacatctgacgttcagattgcaatgcgttggagtggtaagttatggcgatcaaatcaccatgcgcaacagaacgcgtatccagataactgcctggcaccagaatcatactggagttaacctggcgctgaggattagtcattgcggtgcctgtatcaatgctgcgtacaccatcaacattgaaaaaatactcgtacaggttgcctttcaggataggtgtgcgccagctccagactcctgcttcgtctttggtcatcgggtgaatattgtccggaaccggaacacccaccactacagagacattttttgccccaggggcaaagtagcgaaaggtcacgctgttatcggcattgacctgagtcacatactgtttcaccgggatagtgggtgccgggctggctggcatatccgctgctatggcccactgagcagaaataccgctggcaatagccagcgttaaagcagcaatttttatattcatcgtaatattcctttcattaagttccattaccaccagatttcagcctgggcaccgacagcaaactggtcgtctttattgtcttcaaaggtgaagccatccagttcgttttccagggctttgatatacgtggcgtagaaacgaatttccggacggctggtcaacatactggtattgactttaaaggtatggaagagcgtggttttataaccagactcattaaatttattactattcgcatctttgttttgctgggtgaaatagcccagttcaacacctgtctggttatattggtcccaaatataggccgggcgaacaaccgcacgaatagattcgaaatcagagtgggcgcctgtttcgtagctatatatatcgttaccgaaggagtaaacaatcgcgttagctacaatgaaatgatcgccaatataggcttcgccctggctagtcagacgtaccgctgttccgccggtgtgatcaccataataacgaccattaaaggtggtaaatggacttgcgccagcataacggccaaagttactggcgatagagttattcgcgaccaggaaggagaattcgttgaagccacctttatcaaatttctgcgttaaagatgtgccaaacatccaggtatctttccagtcataatacccgttattatcctgattatctttttcgcttgcgctttcgtttgccgtgacataacgaccacttaccattaaggtggctttatcccataacgggatatctttatagcgtaaatcaatggtattggtattaatctgctgtttgttttgcaggctgcgatcgtaatcatcgacatcttcgcgaaccagcgcgatatcaattttacccggaccgactttccagttttccagacctacacccgctgcggcatcagtacgctgcgttttccagtcaagcatctggatttcaattttcggcgcaccgtgtttacccacccagaaatcagcctctggcgcaaagggcaggaaacctttggtggtaacgtacatatcggagaactgcatatagttctcgccaccggcgttatcgccaaaccagccggtagagtactgctgaccaacgttaccatccatcatcacaacggcatcaacccgtttgccgttttcgttgtagacacgttgttttaactgcaaatcaaaccagccggagtattcgttaccaaagcggcccagagaaccaatcgcccaacttttaggactaccatgagaggcggtcccccaaccagaacggtaatagccgttgtaactaaagccaatttcatctttcacaaatttactgaaatctttcagagtcatggaagaataaatgctgcctgtctcactggcatttttctcttcatttttgaccagtacagcatcaggttttgcggcactactggtcgggaacggattggcggcatacccttgatcattcgtacttacgctacgattcaccgtcgctggcgtatactttttcttctcttcatctttatactttttgagttcgctttgcgtttctcttaacgccttttctaataactcaaggcgttgttccaccgttaaactttcagccaaactttgtgcagaaaaggctaacggtgccattaataagatggcagaggtaataagatttcgtctaaacataatatccctttatggtgcaaagaaagaattaacgcatcgcatccagactgttctgaatgcgacgataattaaggtgctttaatggttattttttttaaactcagcccccgcgtcttgatcacctctgcataccatccgaagcttttcttgcgtgttcttgtgaggcttccttcgccattatcatcacgatccacataaataaagccgtagcgcttagacatttgactatgagatgcactgactaaatcaattggcccccaactggtgtaccccataatatccacaccatcggcaatcgcttcatttacctgtaccaggtgatcgtttaaataggcaattcgataatcgtcctgtatgctaccatccgcttcaacgctgtcttttgcgcctaatccgttctcgacaataaataacggtttttgataacgatcccaaagcgtatttaacagaacccgtaatccaaccggatcaatttgccacccccactcactacttttcagatgcggattggggatcatattcagtatgttgccctgcgcatttttattaatgctttcgtcgtgggaaacacaaccagtcatgtaataactaaaagagatgaaatcgacggtatgttttaaatcttctgcgtcactttcagtcatctcaatggtgatattgtggtcgcggaagaaacgctgcatatagccgggatactggccacgcgcctgaacatcaccaaagaacatccagcgccggttctcttccatggcctgcaacatatcctgtggctggcaggtgagggggtaaaccagcccaccgagaagcatattgccgattttcgcttcggggagcaggctatgacaggctttaactgcccgcgcactggcaaccagttgatggtggatagcctgataaacttccgcctcgccactctcttctgccagccccacgcccgtgaatggcgcgtgtaagctcatgttgatttcattaaacgtcagccataacgccactttatgttggtagcgagtaaagaccgtgcgggcgtaatgctcgaagtgatcgatgaccgctcgattagcccaaccgccgtagtttttcaccagcccatatggcatttcgtaatgggataacgttaccagcggcttgatccccgcctgcgccatttcatcaaacagccgatcgtaaaacgctaaccccgcttcattcggttcgacttcgtcgccctgagggaaaattcgcgcccaggcaatggaaatacgcagacaggtgaagcccatctcggcaaataacgcgatatcttccgggtaacggtgataaaaatcgatggcgacatctttgatattctctttccccaggatgcgcggttccatttttcccattacgccatgaggctgtaaatcactggtgctgatccctttgccatcttcctgccaggcaccttccacctgattggcagctgttgcgccaccccaaagaaatgtttctggaaatgctttcataattaactccttttatcgttagcgaatgatggataacagcggttcacctgcgcttatctgcgccgtgccgtggggtaatacgtccgtaaaatcatcgctattactgattaataccggcgtcgtcagatcaaatccggcctcgcgaatagcagggatatcaaaagaaatcagccgatcgcctgtattgaccttgtcacccacgttgacgtgagcggaaaagaatttgccgtccagttttacggtgtcgataccgacatgaatcaggatctccacaccatcatcactctcaatgccaatggcgtgtaatgtggcgaacaagctagcaattcgacccgcaaccggagaacgcacttcaccaacgctgggcagaatggcaatacctttacccaacaggccactggcaaacgtggtatcagcgacgtgaatgagcggcacaatctctcccgtcatcggactacagataccgccctgctcaggtggtgtaataacctctggtgttttctcttgcggggcaccctgcgctggctgacgtttagcggtgatgaaatgaagcatcaccgtaccgacaaatgcgcaaccgatggcaatgacaccgccaataacgctggcccagacggtgaaatcaattcccgtactcgggatggtttgcatgaaggtgaaaatacttggcaaaccaaaggagtagactttcgtttgcgcgtagccaataatggtggccccccaaagccccactgatacaggcgataacaaaggggtacttacgcggcaggttgacgccatataccgctggttcggtgataccaaacagactcgtcaacgccgcacttcccgccaccacttttttctgcgcatcgcgttcgcagaggaagacgccgagcgccgccccgacctgcgccataatggcgggcattaacagcgggatcatggtgtcgtagcccagcacggtgaagttattgatacacagcggcaccaggccccagtgcagtccgaacatgacgaagatttgccagaagccgcccattaccgcgcccgcaaatgcaggaaccgcctgataaagccagagataaccggcggcaatcagttcgcttatccaggtacttagcggccccaccagcagaaaggtgacgggtgtgataaccatcagacatagcaatggtgtgaagaaatttttgattgcgctcggtaaccacgcattaagtcggcgttccagaatgctgcacaaccaggcagaaaaaataatgggaataacgctactgctgtaattcaacaatgtgaccggaatacccaggaaatccagccccagcgcatccgctttttgcccgttctcgaaagcagtcagaattaatggatgcactaacgctccaccaatcaccatggcagtaaatggattaccgccgaagcgtttccccgcggtgtatcccaggattatcgggaagaaccaaaacaaggcatcactggcgctgaataaaattaaataagtaccactttgttcggtcgtccactgaaaagtgagcgccagagccagcatacctttcaagatcccggttgccgccatcaaaccgatcagaggcgtaaaaataccactaataacataaacaaagcggtttagcagattacctttatcatcattttccggtgcctgttgcgctttttcgtcaaggcctgccacactgttaaccgccaggaagacatcggccacatggttacctatgaccacctgaaactggccaccgctttccaccaccataataataccgggggtctttttcagtacctctgcttgcgctttgctttcatcctttaatttaaaacgtaatcgcgttgcgcaatgcatcagactcacaatgttatctgcgcccccgactcctgcgactatttttctggctaactccgtcataacttgccctctaccgctttgcggcaaaactccaaaaaaaaacctgaaaaaaacggcctgacgtgaatcaagcaatttttttcaggttttgcccgcttagtgcggtaacaatcctttactcagtaataatatttcagtgttctttgcgcacgcgctctatatttatggctaaaaacataatctctgcgggactaattttacgttgatactgcaaaccaataaaaatggcgatccgttccgcacattgccatgcttgcgggtaattttgttttactgcttgttgtaaactttcatcactatcgttaatactagcatgttcaagaatacgccaggataaaaacttcagatgtgtaaccagtcgctgataactcaagctttcttcctggtaattaaggctgaactgaaattttattaattgcagcatttcgcgcattaactgcgtgacacctgcaacatcctccatatttccgctcatttgggcactgaccagatgcatggcaataaagcccacttcatctttcggtaactgcacgcccaaccgtttatcaataatggttaacgcttcttcccctagctggaactctttcgggtaaagccgctggatatcccacagcaacgggttgggcagcaacacgttttgctgaaagcgtttaatcgcaaactggcaatggtcagttaggctgatataaatactgtcctgtaattttcccaagcgctcctgcgctaaagagataatacgatcacaggttgccatcacctcaagaggaatatgacttaagagttcgcttaatcgcccgttcagttcatgactgctcaaggcatactctttttctattccactactgttaattctttcgccagcgcgtttttgaaagccaattccgcgccccatgacgactttttcccgctgttgatcatcaataaccaccacaacattattgttgagaattttggtgatttgcatgttcatagcaaggaccttttttataaacaaaaaaacccgacttcaccagtattctctggttatgtcaggttttgcctgcgaatgcagtaacaatccagtcatttattaatggtttttataacgaacatccaggttcggaaattaatttaattgcgtgcagagaaaatagcaatgcgctattgataaaaatatgaccatgctcgcagttattaactttgtgtaattttaggaatttataaagttatatataacaaatcccaataattaagttattgggatttgtctggtgaattatttgtcgctatctttccccgccagcagtttatccagctcatcgccaccgacgtgacggaaatcctgccccttcacgtagtagaagataaactcacaaatattctggcagcggtcgccaatacgttcgatagaacgcgcgcagaacagcgcagtaagtacgctcggaatggtacggctatcttccatcatgtaggtcatcagttgacgaacaataccttcgtattcctgatcgacttttttatcttcacgataaatacgtaccgcttcgtcaatgtccatccgcgcgaacgcgtccagcacgtcgtgcagcatctggatggtatgacggcccaggctctccagacttaccagcaacggctgatgctgctgggagaatttctccagcgcagtacggcagattttgtccgccacgtcgccaatacgctccagctcggcaatggttttactgatcaccataaccagtcgcaggtcgctcgccgtcggctgacgtttggcgataatgcgcacgcaggcttcatcgatcgccacttccatcatgttgacgttcttgtcgccttcgatgacgcgcttcgccagatcgctgtcctggttatgcatcgcggtgattgcatcagaaagctgctgctccaccatgccgcccatggtcatcacctgcgtgcggatactttccagttcggcgttgaactggccggaaatatgtttattaagattgagactgtccataacgcactcctgaatcaaccgtaacgaccggtgatgtagtcttctgtttgtttcttcgctggcttggtgaacagatcgtccgtgttgctgaactcaatcaattcgcccaggtacataaacgccgtgtggtcggaacaacgcgcagcctgctgcatgttgtgggtgacgatcaccacggtgtaatcctgcttcagttcggtgatcagctcttcaatacgcccggtagagatagggtcgagcgcgctacacggttcgtcgagcagcagcacttccgggcgaatggcgataccacgcgcaatacacagacgctgttgctgaccaccagagagagagtaaccgctctggtgcaatttatctttggtttcgttccacaatgcggctttggtcaatgcccactgcacgcgctcgtccatgtcggcacgggagagcttctcaaacagacgaacgccaaaagcgatgttgtcgtagatggacatcggaaacggcgtcggtttctggaacaccatgcccactttcgcacgcagcagtgcgatatcctgagagttggtcaggatgttgtcgccatcaagcagaatttcaccttccgcacgctgctccgggtacagttcaaacattttgttgaaggtacgcagcagcgtgcttttaccgcagccggacggcccgataaacgccgttacctggtttttagcgatatccaggttgatgtttttcagggcatggaatttgccgtagtagaagttcaaattacgaacctgaattttactcggggcagtttcaaccatactcattgcaatcttttcctcatcgtgcctgatgcacttcgctaatcaggcttaccgtaggccggatcaggcgttcacgccgcatccggcaaagtgttaaccgtgtacagagtcaaaaaggcgctcggtcggtcccctcgcccctctggggagagggttagggtgaggggaaaaccgtgtcagcaatatcaaccgtgtttattcttcgcaaaaacaacgcgcgccagaatgttcagcagcagtacgcacagggtaatgatcaataccccggcccaggccaattgctgccattccgcaaacgggctcatcgcaaacttaaagatcgtcaccggcaggttggcgatcggctgcatcatgtccgtgctccagaactggttggagagcgcggtaaacagcagcggcgcggtttcaccagcaatacgggcaatcgccagcaggataccggtcataatcccggacacgctcgctttcagcgtaatcgcagagatcatcttccacttcggtgtacccagcgcataagccgcttcacgcaggctgtacggcaccagtttcagcatgttctcggtggtgcggataacaatcggcacctgcaacaacgccagggcaatcacgcccgcccagccggagaagtgctccatctgcgccaccacaatggtgtaaacaaacagaccaaccacaatgctcggcgcagagagcagaatgtcgttaatgaagcgaatcacttctgccagccaggatttacgaccatattccgccagataaatccccgccataatgcccagcggcgtaccgaataccgtggcccacaaaattaacagcccgctacccgccagagcgttcgccagaccaccaccttccgtattgggcggcggcgtcatttcagtgaacagcgccaggctcataccgtcgataccgcgagtgatggtggacattaaaatccagatcagccagaacaggccgaaggccatcgtcgccatgctgagcgtcagcgcaatacggtttttgaggcggcgacgcgcctgcattttgcggcgagattcagccagcgccgcagtggtttgcatttcaaccatagccattagcgtgccccctcattcttagccaggcgcataatcataaacttgcttgcggcgaggacgatgaaggtaatcacaaacaggatcaggcccagttccatcagtgcggcaacgtgcagaccggattccgcttccgcaaattcgttcgccagcgcagaggtgatactgttgcccggcatatacaggctggcgctgtcgagctggtaggtgttaccgatgataaaggtcaccgccatggtttcaccgagcgcgcggcccagccccagcatgatgccgccgataacaccatttttggtgaacggaagaacgatacgccagataacttcccaggtggtgcagccaataccgtaggcgctctctttcatcatcaccggggtttgttcgaacacatcacgcattaccgccgcaatgtacggaataatcatgatggcgaggatcacgcctgccgcgaggataccgataccaaatgcggggccagagaacagcgcgccaacaatcgggatattgctcatgatattgccgaccggctcctgaaagtaaacggcgaacagcggcgcaaagataaacaggccccacatgccgtaaacgatacttggaatggctgccagcagctcaatggcgatacccagcgggcgtttcagccagccaggcgcaagctcagtcaggaacagggcgataccgaaactcaccgggacggcgatcagcagcgcgataaagctagtcaccaacgtaccgtagatcggcaccagcgccccgtagatatcgttcggtgcatcccactctttggtccataggaaagccagaccaaatttctgaatgctcggccaggaggagatgatcagagagacaataatgccacccaacatcaatagcacaatcagcgccgccagttttaccagcacgctgaaaattatgtcgccctttttacccggtgggttaaaagcaggcttggttgcagccataagttactcttcagttaaacgcgtttacaaagtcattttgtaatgccggatgcggcgtaaaacaccgtacccggcctggagttttattagtacagcggcttaccgctactgtctttaatattggtcttccacgcagcgcgaacctgttcaactacactatccggcaggctggcgtaatccaggtcgttcgcctgtttagccccggttttgtacgcccagtcgaagaatttcagcacttctgtgccttgttctggtttcttctgatctttgtggatcagaatgaacgtggtagaggtaataggccatgcatcttcgcctttctggttggtcagatcctgagcgaaggttttgctccagtctgcaccttttgctgcattagcgaagttttcttcggtcggactaaccggtttaccatcagcggagatcagtttggtgtacgccaggttgttctgcttcgcgtaagcatattcaacataaccaattgcacccggcagacgctgaacgaacgcggcgataccgtcgttacctttaccgcccagaccgatcggccattttacggtagagccagtaccaacgttgtttttccactcttcgttcactttcgccaggtagctggtgaagacgaaggaagtcccggagccatctgcgcggcgtactacagcaatgttttgactaggcagtttcagacccggattcagtttggcgatggcttcatcatcccacttcttgattttgcccaggtagatgtcgccgagggttttaccatccagcaccagttcgccagacttcagccctggaatgttaaccgccagcaccacgccgccaatcacggtcgggaactggaacagaccttcctgagccagtttttcgtcagacagcggcgcgtcagaggcaccaaaatcaacggtattagcgataatctgttttacgccaccggaagaaccgataccctggtagttaactttattaccggtttctttctggtaagtgtcagcccatttggcatacaccggcgcagggaaggttgcacctgcacctgtcaggcttgcttctgcaaacacagagaaagcactcatgcttaaggtcgcggcgacaacagttgcgacggtggtacgcataactttcataatgtctcctgggaggattcataaagcattgtttgttggctacgagaagcaaaataggacaaacaggtgacagttatatgtaaggaatatgacagttttatgacagagagataaagtcttcagtctgatttaaataagcgttgatattcagtcaattacaaacattaataacgaagagatgacagaaaaattttcattctgtgacagagaaaaagtagccgaagatgacggtttgtcacatggagttggcaggatgtttgattaaaaacataacaggaagaaaaatgccccgcttacgcagggcatccatttattactcaaccgtaacgctttttgccaggttacgcggctggtcaacgtcggtgcctttgatcagcgcgacatggtaagccagcagctgcagcggaacggtgtagaagatcggtgcaatcacctcttccacatgcggcatctcgatgatgtgcatgttatcgctacttacaaaacccgcatcctgatcggcgaagacatacaactgaccgccacgcgcgcgaacttcttcaatgttggatttcagtttttccagcaattcgttgttcggtgcaacaacaataaccggcatatcggcatcaattagcgccagcggaccgtgtttcagttcgccagcagcgtaggcttcagcgtgaatgtaagagatctctttcaacttcaatgcgccttccagcgcgattgggtactgatcgccacggcccaggaacagcgcgtgatgtttgtcagagaaatcttctgccagcgcttcaatgcgtttgtcctgagacagcatctgctcaatacggctcggcagcgcctgcagaccatgcacgatgtcatgttcaatggaggcatccagacctttcaggcgagacagcttcgccaccagcatcaacagcacagttaactgagtggtgaatgctttagtggatgccacgccgatttctgtacccgcgttggtcattagcgccagatcggattcgcgcaccagagaagaacccggaacgttacagattgccagactaccaaggtaacccagctctttgctcagacgcaggccagccagggtatccgcggtttcgccagactgactcaaggtgatcatcaggctgttacgacgcacggcagatttgcgatagcggaattcagaggcgatttcgacgtcgcacggaatacctgctaggctttcaaaccagtagcgggaaaccataccggagttataagaagtaccacaggcgaggatctgaatatgctcaaccttgctcagcagttcgtcggcgttcggtcccagctcgcttaaatcaacctgaccgtggctgatgcgtccggtaagggtgtttttgatcgcgttcggctgttcgtagatctctttctgcatgtagtgacggtaaatgcctttatcgcccgcgtcatattgcagattggattcgatatcctgacgttttacttccgcgccagttttatcgaagatgtttacgctacggcgagtgatttccgcaatatcgccctcttcaaggaagataaagcgacgggtcaccggcaacagcgccagctggtcagaagcgataaagttttcgcccatccccaggccaatcaccagcggactaccagaacgtgccgccagcagggtatccgggtgacgggagtccatgatcactgtaccgtacgcaccacgcagctgcgggatagcacgcagaacggcctcacgcagagtcccgccttgtttcagctcccagttcaccagatgggcaatcacttcggtgtcggtttcagaaacgaaggtatagccacgcgcttttagctcttcacgcagcggttcatggttttcgatgatgccgttatgcaccaccacaatgtgttcagaaacatgcggatgcgcattcacttcactaggttcaccgtgggtcgcccagcgagtgtgagcaataccagtgccgccatgcagaggatgttcttccgctgcctgtgccagcatctggactttaccgaggcgacgcaggcgggtcatatgaccttctgcatcaacaacggccagaccggcagagtcatatccgcggtattccagacgacgtaaaccttcaagaaggatttctgctacatcacgttgcgcgatcgcgccaacaattccacacatagtttttgattccgatttatatcgttgtcggtcaacctgtatgcccgttttttcgggcgccccgagccttgtagagagtggggttatttttatagttactgcttgtgggagggagattatgttatctcctcatcccatgtgaccgggttagccggccagaatcactttttctttaccggacgacgccagccttctttctgagtctgcggcacacggctgatagctaatgcattttcgccgacattacgcgtcacagttgtacccgcagcaatggtcgcgcctttgcctactgttaccggggccaccagctgagtgtcggaaccaacaaacacatcgtcgccgataatggtcttaaatttattcgcaccatcgtagttgcaggtaatggttcccgcgccgatgttaacgttatcgccaatttccgcatcgcccaggtaagtcagatgaccagctttgctgcctttacccagacgcgcttttttcatctcaacgaagttaccgacgtgagcaccttccagcaactcagcaccaggacgcaaacgggcaaacgggccaatggtacaggccgctgccagattcgcatcttccacaacggtatacggactgatttcgcaatcatcgccaatcacgctgtttttaatcacgcaaccggtgccaattttcacgcgatgaccgagagtcacgttgccctcgatgataacgttagtatcaatttcaacatcgcgcccgtgagttagcgtaccacgcagatcaaaacgcgctggatcgcgcagcataacgcctgctaacagcagtttttcagcctgttcggactgataaacacgctccagacgggagagttgcaggcggttattcacgccttctacttcgcttaaacgttgcggatgaacggcgacgatttcacgcccttcctgatacgccagcgcaataatgtcggtgatgtagtattcgccctgagcattattgttggtcagcttcgccagccagcgtttcatatctgcgccgttggcaatcagaatgccggtgttgatctcctgaatctgacgctgctcgtcggtggcatctttgtgctcaacaatgccggtaactttgccgttttcacgggtgatacgtccataaccggtcggatcatccagtttcaccgtcagcagaccaatgccaccctgcggtttagcatcacgcagacgctggagtgtttcgacagagatcagcggcacgtcgccgtagagcattaaaatgtcttcatcatcggcaaagaaaggtgcggcctgctgcattgcatgacccgtacccagctgctctgcctgaagcacccagttaaggttgtcgtctttcagcgcctgttttagcagatcgccgccgtgaccgtacaccaggtgaacgtgcgctgcgcctaattcattcgcagcatcaatgacatgctgaaccatcgctttcccggcaagggtatgcagcactttcggaagatcggaatacatgcgcgtgcctttgcctgcggcaaggatcactacgctcatagcattattcaacatacgcgtcctgactgtaatttgagaacgaatttaaaccgcttcaccttgaaaaaactacatttttttcatcgtgaaatggacagaggataaattgttcaataacggattatccccgctgacgaaagcgccattttcgaccatcgtcacgccttttgtctgcagaaaattaaggcagtaccttaatttaagcgtcaggtggatgtttttgctcttatttcgatcaatgaataaacaggaaaacaggggggttttatatcagcaggatctatgtgaacgctattcaggacgggtcacacgcgcaaaaaaaagccagcctgtttccagactggcttttgtgcttttcaagccggtgttacatcgcttttttggtcaactcgataacgcgcagctgcgcgatcgctttggccagttccgcagacgcctgagcgtaatctacgtcgccgtgagagctgctaatgtgctcttcagccttacgtttcgcttccatggctcgcgcttcgtcgagatcctggccgcgaattgcggtgtcggccagaacggtcacgttgccaggctgcacttcaagaatgccgccagacagatagataaactcttcgtgaccgtgctgtttcacgatgcgaatcataccaggcttaatggcggtgagcagcggtgcgtggccagggtagatccccagttcaccttcgctacccgttacctggattttctcgaccagaccagagaacatttgttgctctgcgctgacgacgtccaggtggtaagtcattgccatatcaccctccgattaaggcgttaaagttttttggctttttccacagcttcttcgatggaaccgaccatgtagaacgcctgctccggcaggtgatcgtattcgccttccatgatgcctttaaagccacggatggtgtctttcagggagacgtatttacccggagaaccggtgaatacttctgccacgaagaacggctgggacaggaagcgctggatcttacgagcacgcgctaccaccagtttgtcttcttcagacagttcatccatacccaggatggcgatgatgtctttcagttcctgataacgttgcaggatggactgaacgccacgcgcggtgtcgtagtgttcctgaccaaccaccagcgggtccagctgacggctggtggagtccagcgggtcaacggccgggtagatacccagagacgcgatctgacggctcagtaccacggttgcgtcaaggtgcgcaaaggtggttgccggagacgggtcagtcaagtcatccgcaggtacgtatactgcctgtacggaggtgatagaaccagttttggtggaggtgatacgttcctgcagaacgcccatctcttccgccagggtcggctgataacctaccgcactaggcatacggcccagcagtgcggatacttccgtaccggccagggtgtaacgatagatgttgtcaacgaacagcagaacgtcacgaccttcgtcacggaatttctcagccatggtcagaccggtcagagcaacgcgcagacggtttcccggcggctcgttcatctggccatacaccagggatactttgtcgataacgttggagtcggtcatttcgtggtagaagtcgttaccctcacgagtacgttcacctacgcccgcaaacacagagtaaccggagtgctcgatcgcgatgttacgaatgagctccatcatgtttacggttttacctacacccgcaccaccgaacagaccaactttaccgcccttagcgaacggacacatcaggtcgataactttgataccggtttccagcagttcctgagagttactcagctcttcgtaggaaggtgctgcgcggtgaatcgcccaacgctcttcttcaccgatctcgcctttcatgtcgaccggttcacccagtacgttcatgatacggcccagagtcgctttacctaccgggacttcaatcgggtgttcgaggtcttttacatccagaccgcgacgcagaccgtcggaggaacccattgcgatggtacgtacgataccgccgccgagctgctgctgaacttccagcaccagacgctcattaccattttgcacctcaagagcatcgtacacgcgcggtacggcatcctgagggaattcgacgtcaactacggcgccgattacctggacaatctttccagtagccatcttaaatcctctacgaaataacctgtttaaaccgcggcggccccgctgacgatctcggtgagttcctgagtaatgctggcctgacgagctttgttgtataccaactgcagctctttaatcaggctgccgccattgtcggtcgcggctttcatcgccaccatacgggcggcctgctcgctggccaggttttcaaccacgccctgataaacctgagattcgacataacgacgcagcagggtatccagcaacgccttcggatcgggttcgtacaggtaatcccaggatttatgtttcagatcatcatcatcacttgccggtaacggcagcagctggctgatggtcggaacctgagacatggtgttaataaatttgttgctgacaatgtaaagcttgtccagacggccttcgtcgtaggcctgcaacatcacttttaccggaccgatcagttcggacagggaagggttatcccccatgccggtgacctgggcaacaacattgccgcccacggagttgaagaagctcacgcctttgctgccgatcattgcgaggtcgcattgaacgcctttgtcggtccaggtcttcatttccgccagcagttttttgaacaggttaatgttcaaaccaccgcacaaaccacggtcggtgctcaccaccaggtagcccacgcgtttaacgtcgcggtcttccaggtaagggtgcttatattccagattaccgtgtgcaaggtgaccaatcactttgcgcatggtttctgcataaggacggctggccgccatgcgatcctggcttttacgcattttggaagcggcgaccatctccatcgctttagtgatcttttgcgtgttctggacgcttgcgatcttactacgtatctcttttgcgccggccatgagcttctcctcaatgccttgcggcctgccctaaggcaagccgccagacgttaccaggattgggttgctttgaaggaatcgaggatgcctttcagcttgccttcgatttcgtcgttgtagccaccggtctggttgatctcttgcatcaacggagcgtgatcacggtcgacgtaagccagcagagcggcttcgaagctgccaattttgctcagttcaacatccgccaggtaaccacgttctgctgcgaacagaaccagagactgctgcgcaacggacatcggcgcatactgtttctgtttcagcagttcggtcactttctgaccgtggtcaagctgcttacgtgttgcatcgtcaaggtcggatgcaaactgagagaacgctgccagttcacgatactgtgccagagcggtacggataccaccggacagttttttcatgatcttggtctgtgctgcaccaccaacacgggatacggaaatacccgggttaaccgcaggacgaataccggcgttgaacaggttggtttccaggaagatctgaccatcggtaatggagattacgttggtcggaacgaacgcagaaacgtcacccgcctgagtttcgataatcggcagtgcggtcagagaaccggttttccctttcacttcacctttggtgaaggcttcaacgtattcggcgttaacacgtgcagcacgctccagcagacgagagtggaggtagaaaacgtcgcccgggaatgcttcacgtcctggcggacgacggagcagcagggagatctgacggtaagcaacagcctgtttagacaggtcatcgtaaatgatcagcgcatcttcaccgcggtcacggaagtattcgcccattgcgcaaccggcatacggtgccaggtattgcagtgcagcggattcagacgcggttgctaccacaacgatggtgttagccagtgcgccgtgctcttccagtttacgtaccacgttagaaatggtggacgctttctggccgatagcgacatagatacatttgataccggaatcgcgctggttgatgatggcatcgatagccagtgcggttttacctgtctgacggtcaccgatgatcaattcacgctgaccacgaccgattgggatcatggagtcaacggctttataaccggtctgtaccggctgatctacggactgacgttcgataacgcccggagcgattgcttctacagcagagaagccgtcgtgatccagcggacctttaccgtcgattggtgcacccagagtgttaaccacacggcccagcaggccacggccaaccggaacttccaggatacggccagtacacttaactttcatgccttcggcaaggtcagcgtacggacccataacaaccgcacctacagagtcgcgctcgaggttcagtgcgatagcgtaacggttacccggcagggagatcatttcaccctgcatacaatcggccaggccgtgaatgcggataacaccgtcacttacagaaacaatagtaccttcgttgtgagcttcactcacaacattgaactgagcaatgcgctgcttgatcagttcgctgatttcggtggaattcagttgcatgctccagtccccttaagactgcaagacgtctgcaaggcgctcaagacgaccgcgtacgctgccatcaatgaccatatcacccgctcggatgataacgcctgccattacagacttatcgattttgcaattcagcttaactttgcgactcagacgtttttccatcgcagcagaaattttcgcgagctgttgttcactcagtgcggcagcggaaatgacgtctacctcagcggtagcctcactcacggcacgcaggtgaataaactgctccagaacatccgggagcgcgttaagacgaccattttcagccataacccgaatcaggttctgaccgttttcgtccagttgctcaccacaaactgcgataaagctctcggcgagcgtttctggcgcaagcgcgccagagagaagctctgccatttgttcgtttttggttacctcggcggcaaacgccagcatgtcctgccagcgttctacactttggtgttcgacggcaaagtcaaaagctgctttggcgtaggggcgagctaccgtaataaattcagacatcagcccctccctccttacagttcagcgacaagtttatccacgatgtcgctgttagcagcttcatccacggaacgttcgatgatcttctcggcgccagcaacagccaggatagcaacttgcttacgcagctcttcacgggcacgtttacgctcggcttcaatttccgcctgcgcctgggccacgattttagtacgttcctgttctgcctcagctttcgcttcgtccagaatctggctgcggcgtttgttcgcctgctcgatgattacctgggcttccgctttcgcttttttcagctggtcggtcgcgctggcctttgcaaggtcaaggtccttatgtgctcgttctgcggaagcaaggccgtcagcaatttctttttgacgtttttcgatggctgccattaatggcggccatacgtacttcatgcagaacagaacgaacaggacaaacgcgatggcctggccgaggattgttgcgttaagattcacagcacaatgcctctatttagttaacgttctgatattgctctttaaataaaagcaacgcttattacgcgacagcgaacatcacgtacagacccagacctacagcgatcatcgggatagcatccaccagacccataacgataaagaactgagtacgcagcagaggaatcagatcaggttgacgcgctgcgccttccaggaatttacccccgaggatgccgataccgatcgcagcaccgattgccgccagacccatcatcacagcggcagccatgtacagcagatccatattcaggttttccatgacagtctccagtttgtttcagttaaaacgtagtagtgttggtaaattaatgttcttcagacgccatgctcagatagacgatcgtcagaaccatgaagatgaaggcttgcagcgtaatgatcaggatgtggaaaatggcccacggcacattcaggatccactgactccaccacggcaacagaccagcaatcagaatgaaaatcagctcaccggcatacatgttaccgaacagtcgcaaaccgagactaactggtttggacagcaggcttaccccttcaaggattaagttgacaggaatgaacgcccagtgattgaacggctgcagcgtcaactctttcgtgaagccgccgatgcctttcattttgatgctgtagaacagaatcaggataaatacgcccagtgccatagacagcgttacgttcacgtccgcagacggaaccacacgcagtgcaggcagacccagtacatgttcagcaatgtacggcagcaggtcgataggcagtaaatccatcaggttcatcaggaatacccagacgaagatcgtcagggccagcggagcaatcagcttgcttttgccatggtacatgtctttcacgctaccattaacaaagccgatcaccagctcaatcgcggtctgaaacttacctggcacaccgctggtcgcctttttggctacgctacggaataaaaccaggaacaacagacccagcaccacgctgaagaacatggagtcaatattgattgtccagaaggtggctggggggttttgtggatccaccaggctgaatgtacgcaggtccagctgaaggttattcaggtggtgtcctatgtaatcctgcggcgtcatattttcactagccatgatgccttttaccctttgttgttaattacagccggtgccagtatctgaaccaccagcaccaaaacccacgtaacgatcagcggcaagaataccgcctttaaaaccgccaacgccaccaccagtaacaccaacatcgccagaactttgaaagcttcgccaaatgcgaatgtccaggccacccggcctttcgctggtgtatgcgcctggtgacgccaggcaaatatcataaacaaaacgttaggcagaaagactgccaggcccccgcttattgcagagacgccccagaaggggtctttgaggctgaacagcaatccacttgctatcaccaccagtaactgaacgagcagaagcttccgagcaacgtttcgactcacgaggctcacagacatcacgtttttcactcctgctcccttcgaggtatgccgcgtgtcgtataaaactttctttaaggcttagagtcaagcatcaaaaagcggtcaaattatacggtgcgcccccgtgatttcaaacaataagtagccaaaaggtgaataaatgtttaaatatttttccagtgcatacaattgcgacttttctgctaaccctgttcgatcatgaaaaactgtaaataacgcgtaaacactggtgataaagcgtgcttcagatcacatattgcgcatgttcgcgcacagcatatttatttacttggcaaatgatgcctttgcaagtttatgatatttcagtctaaaaacagatactgttttaataaatgacatttacacaacaaaaaccacccattgacatttttaataatgttttaacagccaatgatggttcttagcgccgatttttagcagactgatattttcactaatgacttattttctgcttaccaaaaaaagccacgttatcttgttgatgcaaaagagtgaacgtggcgttaaatgtaaccagttatatcagtagaaaacctggttgttgttaacagtctaaccggtcaattttttatgatttttttgataaaaattaaattttatttgctttaatcaccaccagatgacgttcgccatccagggctggaacctgaagtttaaccacactttcgacctgatattcttcgggcaacaaagcgatttcatcttccggcatttgccctttcagcgcgtagaaacggccttgctcaccaggaagatggtggcaccagctcaccatatcgttcagagaggcaaaagcgcggctaattacgccatcaaatggcggctcactaggaaactcttctaccctgctctgtactggttcaatattctccagtttaagctcatgttgcacctgacgaaggaaacgcacgcgtttaccaaggctatccaacagagtgaaatgggcttcaggacgcacgatagagagtggaatgcctggcagtcctggtccggtgccgacatcgataaaccgttcaccttgcagatacggtgccaccacaatgctatcgagaatatggcgtaccagcatctcattaggatcgcggacgctagtcaggttgtacgctttgttccatttatgcagcatattcacgtaggcaataagctggtttttctggtgatcggtaaggctaatacctgcgtctttcagcagtaaggagagtttgttgagcacggtgattacctgttcttgatgcgttgcctggtaagcgggtgcttaccaggcatttttaatgcgttatgcgctacgacgcagcataccctgttttttcagccacaccagcagaatggagatggccgcaggcgtgacgccagaaatacggctagcttggccgatagaggctggtttgtgatcgttaagtttggcgatcacttcgttagaaagaccggatacctggcggtaatccagtgtcgcgggtagcagggtgttctcgttacgcagctgcttttcgatctcatcttgctggcgcgcgatataaccttcgtatttaacctgaatctcaacctgttccgccgcctgttcgtctgtcaacgcaggggcaaacggcgtcagcgtggttaatttttcataagtcatttccggacgacgcagcagatcttcaccactggcttcacgggaaagcggcgcagtcaggtgagcattcacttcggctgcagcttccgcgctcggggttacccaggtgcttttcagacgctgacgctcacgctcgatattctcaagtttctcgttaaagcgcgcccaacgttcgtcatccaccaggcccagttcacgaccgatttcagtcaaacgcagatccgcattatcttcgcgtagcatcagacgatattctgcgcggctagtaaacatacgatacggttctttggttcctaaagtgcacaggtcatcaactagtacgccgagatacgcctgagaacgtgccggagcccaaccttctttgtcagcagacagacgggcagcgttaagaccggccagcaaaccttgcgcagcggcttcttcgtaaccggtagtgccgttaatctgaccagcaaagaacagcccctggataaacttgctctccagcgtcggtttcaggtcgcgaggatcgaagaagtcatactcaatggcataacccggacgcacgatcttcgcgttttccatcccctgcatagagcggacgatttgcatctgcacatcgaacggcaggctggtggagataccgttcggataaatttcattagaggtcagtccttccggttcaaggaagatctgatgctgatttctgtcggcgaagcgcatgactttgtcttcgatgctcgggcagtagcgtgggccgacaccttcgatcacccctgcgtacattgggctacgatcgaggttactgcggatcacatcatgggttttctcgttggtatgagtgatataacacggcacctgctggggatgctgggacgcattgcccataaagctgaataccggcattgggttatcgccatgctgttgcgccagtacgctaaagtcgatggttcgagcatcaatacgcggtggtgtcccggttttcagacgaccaacgcgcagcggcagttcacgcaaacggcgagaaagcggaatggacggcggatcaccagcacggccaccgctgtaattatccagaccgatatgaattttaccgtcgaggaacgtcccaacggtgagcacgacggctttggcacggaacttcagtcccatttgggtaacagcaccgaccacgcgatcgttttcgacaataagatcttcaaccgcctgctggaagatcatcaggttcggttggttctccagcgccgtacgtaccgcctgacggtagagcacacgatccgcctgagctcgggtagcgcgaaccgccggtcctttgcttgcgtttagtatcctaaactggatacccgcctgatcgatcgctttcgccatcagaccgccgagtgcatccacttcttttaccagatgtcccttcccaataccgccgatcgccgggttgcagctcatctgccccagagtgtcgatattgtgtgtcaaaagcagagtctgttgacccatacgcgccgcggccatcgcggcctcggtgcctgcatgacccccgccaatgatgatgacgtcaaaaggatccggataaaacatggtgattgcctcgcataacgcggtatgaaaatggattgaagcccgggccgtggattctactcaactttgtcggcttgagaaagacctgggatcctgggtattaaaaagaagatctatttatttagagatctgttctattgtgatctcttattaggatcgcactgccctgtggataacaaggatccggcttttaagatcaacaacctggaaaggatcattaactgtgaatgatcggtgatcctggaccgtataagctgggatcagaatgaggggttatacacaactcaaaaactgaacaacagttgttctttggataactaccggttgatccaagcttcctgacagagttatccacagtagatcgcacgatctgtatacttatttgagtaaattaacccagcttcccagccattcttctgccggatcttccggaatgtcgtgatcaagaatgttgatcttcagtgtttcgcctgtctgttttgcaccggaatttttgagttctgcctcgagtttatcgatagccccacaaaaggtgtcatattcacgactgccaataccgattgcgccaaagcggactgcagaaagatcgggcttctgttcctgcaatgcttcatagaaaggagaaaggttgtccggaatatctccggcaccgtgggtggagctgataaccagccagatcccactggcaggtaaatcttctaacagcggaccgtgcagcgtttcggtggtaaaacccgcctcttccagcttttcagccaggtgttctgctacatattcggcaccgccgagggtgctgccgctgataagagtgatatctgccataaaccgccacctttattaagagtggcgtattgtacgctgtgaacgcgttgggatctacctgtggaaaagtatgggattaaaaaagccgatcagggcttgatggtacgcatgatcgggttttgcaggacgatcaatgtctcggtggactgaatttcatcaattgtttggatcttgttgataagtacatgctggagagcgtcgatgctacggcacatcacttttataaagatgctgtagtggccggttgtgtaataggcttcagtgacttcatcaaggctttccagctttgccagcgcggaagggtagtctttggcgctctttaatataatgccgataaagcagcctacgtcataaccgagctgcttcgggctgacatcaatacgcgccccggtaatgatccccgcctgcttcattttctctactcgaacgtgaatcgtccccggactgacgccaaattgtttcgccagttcggcgtaagcggtgcgcgcattgcccattaatgcttccaggatgccacggtccagattgtcgatcagataattttccataggattttcttatgcggattgatgattcattctattttagccttcttttttaatgaatcaaaagtgagttaggctttttattgaatgattattgcatgtgtgtcggtttttgttgcttaatcataagcaacaggacgcaggagtataaaaaatgaaaaccgcttacattgccaaacaacgtcaaattagcttcgtgaaatctcacttttctcgtcaactggaagaacgtctggggctgatcgaagtccaggcgccgattcttagccgtgtgggggatggcacgcaggataacttgagcggctgtgaaaaagcggtgcaggtaaaagtgaaagctctgcctgatgcccagttcgaagtggttcatagtctggcgaagtggaaacgtcagaccttagggcaacacgacttcagcgcgggcgaagggctgtacacgcacatgaaagcccttcgccccgatgaagaccgtctttctccgttgcacagcgtctatgttgaccagtgggactgggaacgcgtaatgggcgacggtgagcgtcaattcagcactctgaaaagcacggtagaggcgatctgggcgggaattaaagcaaccgaagctgcggttagcgaagagtttggcctggcaccgttcctgccggatcagatccacttcgtacacagccaggagttactgtctcgttatccggatcttgatgccaaagggcgtgagcgggcgatagcgaaagatcttggcgcggtattccttgtcgggattggcggcaagctgagcgatggtcatcgccacgacgtgcgcgcaccggattatgatgactggagcaccccgagtgagctgggccatgcgggtctgaacggcgatattctggtgtggaacccggtactggaagatgcgtttgagctttcctccatggggatccgtgtagatgccgacacgctgaagcatcaactggcgctgaccggtgacgaagatcgcctggagctggagtggcatcaggcgctgctgcgcggtgaaatgccgcagaccatcggcggcggtatcggccagtctcgtttgactatgctgctgctgcaactgccgcatatcggccaggttcagtgtggagtatggccagctgctgttcgcgagagcgtcccttctctgctgtaataatttatcgccgccagcgtctgagcaggcggcttcgcatcccggtatcaaagcgccagatatgatcgaaaatgcgcatgatgccgggtttgccgtgtgcgctcatcgccacggcatgaaagcgatgctgatgtacccgctgcagctctttcactttactcgtcacgtcgtcaggcaaccgctgagcgataaaatcagaaatcaccaccgcatcggcatcaaaccattccctgctttgcaagcgttccataatggcgcgaaaacaactggcaagatcggtgccgccacgaaactgctggcttaaaaaacggattgcttgttcgatgccttgtgggccactaagctcataacggacgatctcggtggaaaatagcataatatagcagcgccggttttctgcgagagcaatgcgcatcaaggccaggcagaacgctttcgcacactgttcattaaagccgcccatactgccggaagtatccacacagacaataaacggcccgcgcggctgttcatcgtaatctttatgtaccaccggacgttcgatcactttttcacgccagctctcaccgtgcaggcgataggtgagcaactgtttttccaccagccgacggtaaaactcatactccagttccgttatccctagtgtcgccagttctggcggcaggagacgtaaaatatcatcgctttgttgcagaccatcaacctgctcaggaaccgtcgccggttcgcgcaccatggtgcggaaggtttccatctgcgcatcgttgcgcggtatacttttggcttcccgagaacgccccagctgctctgccaggcgtttcagttccggctgttcgttaagaaattcaccgtatttcacaatcaactgatagtcgccacgtttaagctgaccggcgctcatatcccacagacgaccagctgcagtattgttatctgcgagaatcggttcaagttgtccgctcagcgtcatgcgttcctgaacttcactcaacagttgttcgcgttcttcttctaatagctgttgatttaacgtcgttgcttgcacgatcagacttaaacgccaacgctggagaaaaagcgtgtgtaacgcactagtgatcgtgctgttagcatcaaccaactgtcgggcttgttctgcccatggagaattcagacgatgcagtaagtccaggatctgtggtagctgcacaataaactgtggcgtggagaggagctggctttgctgatagcacatcacctcttcggtgagttccggcgggactcgggcatctttcagccgactgcgcagcgcttcacgccagcggggaacatcatcagtgattgccgccttcaggcgtgggaatttttcaaagaagaccgccagctgcggactggccagcagtgcgatgatcatctcttcgatcaatccctcttcgctgacggccagcatcacattaagcgtatccagcgttagcattgttgtgcctggcgaatctgtgcaccgacatcctgtaggctggcttcaatgcgacctaaccagtcgccagggataaacagacatttttgctgttcgctgaataaagcgtgttgcttgcgccagtcgctttcaagctcttccagttgttgttttatttcaccaggcagaccttcagcgctactaccgggaagtgccagcgtactgccttgtaaacttacatcgcgaacgacaagatgttgggcgctatcaacttccagattcagtttctgggcaaagccgataccgttcagtttaccgcgaatttcaccacctttgctcagccactgttccagcgcgctacgctcaaaggagatatgaaccacttccatatcatgcagttttaacggtttttgcagcagtagagtcagagtggaagcagtaacgttaacaggaagttgatactgctgacgacggctgaaaatgccgcccagacgaattaccgttaaggctgttttatcgctttgttgctgctggagttgcaggtgacgttgcacaatcgcgccaaggcgagtcaacatcccttgctgttgccaggcgtgaccggtcatcaatacatcaatttgttgttgtatcaaattcaggctttgcgcgtcataccacaggcaatctttcagcaaaatgagatctaccggggcaacagcactgcgaccgctaaaaaaggcgctggcctgcaataatcggatcgcttttttccagcgacgatcgctgacataaggcgcatccggtaatttatccagttgctggcgcagcataaaaatcagctcaaatacatgatcgggcagcgtaatttcaccaatctctttctgccagcgttcatattcttcatctgtgacctgcaaggcatcaggaaccggattgtcgttttcatcctgttgactggtcagcatggagcggaaattcgctttatcctgcactttatctaaccacagacgaatcagcatgcggtcatataacgcttccagactgctgtctgcttccggcagctcgttggaggccgccaccagcagacgcatcgggattttttctacgtgtgcaccgttgcggaactggcgctcgttaatggcggtgagcaaggtattaagaattgccgggcccgctttccagatctcatccagaaagacaatttctgcttccggcaggtaaccgctggttaaacgttcatagcgcccttcatcttttagcgcctgaatagaaaggggaccaaaaacttcttccggcgtggagaagcgggtcatcagatattcaaacgcgcgggcattctgaaaggcgaattttaagcgccgggcgatcaaacttttggcaatacctggcgggccaaggaggaacacactttcaccacttaatgccgctaataaacacaagcggatggcgtggctacgttcataaagccccttttccaagctactgctcaggcgggaaattctttccgctaataaatgagggtgagccataatgaagtggcgtcctttcgtcaaaagttctgcgtaaattgcgagtatagacgtttcttgctggtggctaaaatagtctcaaagggggggtatttttctttgagccaggttaatgtggccgcatttaggagtacgattttgccgttaatcgtgcatactgtgcgcttttttgtgggccaagggactaagcacacatttcatatttcaacgaaagactagtctatgagcactgataataagcaaagtttgcccgcgattaccctcgcggcgattggagttgtctacggcgatattggtaccagcccgttatatacacttcgtgaatgtttgtccggccagtttggttttggcgttgaacgcgatgccgtgtttggctttttaagcctgatcttctggctgctaatctttgtggtttccattaaatatctcaccttcgtgatgcgggcagataacgccggtgagggggggatcctgacgttgatgagccttgccgggcgtaatacgagcgcgcgaaccacaagtatgctggtgattatggggctaatcggcggcagctttttctatggtgaagtcgtcataacacccgctattagcgtgatgagtgccattgaaggtctggaaatcgtcgccccgcagctggatacctggatagttcccctcagtattatcgttctcactttattatttatgattcaaaaacatggcacggctatggtcggtaagctgtttgcgccgatcatgctgacctggtttttgattctggcaggactggggttacgtagcattattgctaacccggaagtgctgcatgcgctgaatccaatgtgggcggtgcatttcttccttgaatacaaaacggtttcttttattgcattaggggcagtggtgttgagcattacgggggtcgaggcgctgtatgctgatatggggcactttggtaagttccctattcgcctggcgtggttcaccgtcgtattaccttccttgacccttaattacttcggtcagggagcgctgttgttaaagaacccggaagcgattaagaacccgttcttcctgttggcaccggactgggcgctgatcccgctgctgatcatcgccgcactggcgacggtaattgccagccaggcggttatctctggcgtcttcagtttgacgcgtcaggcggtacgtctgggatatttgagcccgatgcgcattattcacacctccgaaatggagagtgggcaaatctatattccgtttgtgaactggatgctctatgtcgcggtcgtgattgtgattgtcagctttgagcactccagcaacctggcggcggcgtacgggattgcggtgaccggaaccatggtgctgacgtctattctcagcactaccgtggcacgtcagaactggcactggaataagtattttgttgcgctgatcctgattgctttcctttgtgtcgatattccattgttcaccgctaacctcgataaactgctctccggcggctggttgccattgagcctcggtactgtgatgtttatcgtgatgaccacctggaagagcgagcgtttccgcttgctgcggcggatgcatgaacatggtaactctctggaagcgatgattgctagcctggagaaaagtccgcctgttcgcgtgcccgggaccgcggtgtatatgagccgtgcaatcaacgtcattccctttgcgctgatgcataaccttaaacataacaaggtattgcatgagcgggtgattctgttaactctgcgcaccgaagacgctccatatgtccataacgtccgtcgggtacagattgaacaactgagccccactttctggcgcgtggtggcaagttatggttggcgagaaacgccaaacgtagaagaagttttccaccgctgcggtctggaaggattaagttgccggatgatggaaacctccttctttatgagccatgagagcttgatcctcggcaaacgcccgtggtatttgcgtctgcgcggcaagctgtacttgctgctgcaacgtaatgcgctgcgtgcaccagatcaatttgaaatcccgccaaacagggttatcgaactgggtactcaggtcgaaatctaacgccagacgcctcctttcttcataagggggcgtttttgttttcatggttaatcaccatgtaaaacgtttcgaggttgatcacatttccgtaacgtcacgatggttttcccaactcagtcaggattaaactgtgggtcagcgaaacgtttcgctgatggagaaaaaaatgaaaaaaggcaccgttcttaattctgatattagtagcgtgatctcccgtctgggacataccgatacgctggtggtgtgtgatgctggtttacccatccccaaaagtacaacgcgtatcgatatggcattaacccagggtgtaccttcttttatgcaggtgctgggcgtcgtcacaaatgaaatgcaggtcgaggcggccattatcgcggaagagatcaaacaccataatccgcaactccacgaaacgttgctcactcaccttgagcagctgcaaaaacaccagggaaataccattgaaattcgttacaccacgcatgaacaattcaaacaacaaaccgcagaaagtcaggcggtaattcgcagcggagaatgttctccgtatgcgaatatcattctctgtgctggcgtgacgttctgaggccgtcatggaagcattacttcagcttaaaggcatcgataaagccttcccgggcgtaaaagccctcagcggcgcagcgttaaatgtctatccgggccgcgtgatggcgctggtgggcgaaaacggcgcgggtaaatccaccatgatgaaagtgcttactggcatctatactcgcgatgccggtacgcttttatggctggggaaagaaacgacatttaccgggccaaaatcttcccaggaagccgggattgggattatccatcaggaactgaacctgatcccgcagttgaccattgccgaaaacattttcctcggtcgtgagtttgttaatcgctttggcaaaattgactggaaaaccatgtatgccgaagcggataaattgctggctaaacttaacctgcgctttaaaagcgacaagctggtgggcgatctttccatcggtgaccagcaaatggttgaaatcgccaaagtgctgagctttgagagcaaagtcatcattatggatgaaccgaccgatgcgctgaccgataccgaaaccgaatccctgttccgcgtcatccgcgagctgaaaagccaaggccgcggtattgtctatatctcccaccgcatgaaagaaatcttcgagatttgcgatgacgttaccgtttttcgtgatgggcaatttattgctgagcgcgaagtggcaagtctgaccgaagatagcctgattgagatgatggtgggtcgcaagctggaagatcaatatccgcacctggacaaagcgccgggagatatccgcctgaaagtcgataatctctgcggacctggcgttaacgatgtctcttttactttacgcaaaggcgaaattcttggcgtctctggtttgatgggcgcaggtcgtaccgaactgatgaaagtgctctacggcgcactaccgcgcaccagcggttacgtcaccctggatgggcatgaagtcgttacccgtagtccgcaggatggcctggcaaacggcattgtgtatatctccgaagaccgtaaacgtgacggtttagtgttgggcatgagtgtaaaagagaacatgagcctgacagcgctgcgctacttcagccgcgctggcggcagtttgaagcatgccgatgaacagcaggctgtgagtgatttcattcgtctgtttaatgtgaaaactccgagcatggaacaggcaattggtctgctttccggtggcaatcagcaaaaagtggcgattgcccgcggtctgatgacacgccccaaagtgttgatccttgatgaacctacccgtggcgtagatgtcggcgcgaaaaaagagatctatcaactgattaaccagttcaaagccgatggcttgagcatcattctggtgagtagcgagatgccagaagtattaggcatgagcgatcgcatcatcgtcatgcatgaagggcatctcagcggggaatttactcgtgagcaggccacccaggaagtgttaatggctgccgctgtgggcaagcttaatcgcgtgaatcaggagtaaaaaaatgacaacccagactgtctctggtcgccgttatttcacgaaagcgtggctgatggagcagaaaagccttatcgctctgctggtgctgatcgcgattgtcagcacgttaagcccgaactttttcaccatcaataacttattcaatattctccagcaaaccagtgtgaacgccattatggcggtcgggatgacgctggtgatcctgacgagcggcatcgacttaagcgtaggttctctgttggcgctgaccggcgcagttgctgcatctatcgtcggcattgaagtcaatgcgctggtggctgtcgctgctgctctcgcgttaggtgccgcaattggtgcggtaaccggggtgattgtagcgaaaggtcgcgtccaggcgtttatcgctacgctggttatgatgcttttactgcgcggcgtgaccatggtttataccaacggtagcccagtgaataccggctttactgagaacgccgatctgtttggctggtttggtattggtcgtccgctgggcgtaccgacgccagtctggatcatggggattgtcttcctcgcggcctggtacatgctgcatcacacgcgtctggggcgttacatctacgcgctgggcggcaacgaagcggcaacgcgtctttctggtatcaacgtcaataaaatcaaaatcatcgtctattctctttgtggtctgctggcaagcctggccgggatcattgaagtggcgcgtctctcctccgcacaacccacggcggggactggctatgagctggatgctattgctgcggtggttctgggcggtacgagtctggcgggcggaaaaggtcgcattgttgggacgttgatcggcgcattaattcttggcttccttaataatggattgaatttgttaggtgtttcctcctattaccagatgatcgtcaaagcggtggtgattttgctggcggtgctggtagacaacaaaaagcagtaataacgactacaggacatcttgaatatgaacatgaaaaaactggctaccctggtttccgctgttgcgctaagcgccaccgtcagtgcgaatgcgatggcaaaagacaccatcgcgctggtggtctccacgcttaacaacccgttctttgtaagcctgaaagatggcgcgcagaaagaggcggataaacttggctataacctggtggtgctggactcccagaacaacccggcgaaagagctggcgaacgtgcaggacttaaccgttcgcggcacaaaaattctgctgattaacccgaccgactccgacgcagtgggtaatgctgtgaagatggctaaccaggcgaacatcccggttatcactcttgaccgccaggcaacgaaaggtgaagtggtgagccacattgcttctgataacgtactgggcggcaaaatcgctggtgattacatcgcgaagaaagcgggtgaaggtgccaaagttatcgagctgcaaggcattgctggtacatccgcagcccgtgaacgtggcgaaggcttccagcaggccgttgctgctcacaagtttaatgttcttgccagccagccagcagattttgatcgcattaaaggtttgaacgtaatgcagaacctgttgaccgctcatccggatgttcaggctgtattcgcgcagaatgatgaaatggcgctgggcgcgctgcgcgcactgcaaactgccggtaaaagcgatgtgatggtcgtcggatttgacggtacaccggatggcgaaaaagcggtgaatgatggcaaactagcagcgactatcgctcagctacccgatcagattggcgcgaaaggcgtcgaaaccgcagataaagtgctgaaaggcgagaaagttcaggctaagtatccggttgatctgaaactggttgttaagcagtaattttaatcaggttgtatgacctgatggtgacataaatacgtcatcgacagatgaacgtgtaatataaagaaaagcagggcacgcgccaccctaacacggtggcgcattttatggacatcccgaatatgcaaaacgcaggcagcctcgttgttcttggcagcattaatgctgaccacattcttaatcttcaatcttttcctactccaggcgaaaccgtaaccggtaaccactatcaggttgcatttggcggcaaaggcgcgaatcaggctgtggctgctgggcgtagcggtgcgaatatcgcgtttattgcctgtacgggtgatgacagcattggtgagagcgttcgccagcagctcgccactgataacattgatattactccggtcagcgtgatcaaaggcgaaagtacaggtgtggcgctgatttttgttaatggcgaaggtgagaatgtcatcggtattcatgccggcgctaatgctgccctttccccggcgctggtggaagcgcaacgtgagcgtattgccaacgcgagtgcattattaatgcagctggaaagtccactcgaaagtgtgatggcagcggcgaaaatcgcccatcaaaataagactatcgttgcgcttaacccggctccggctcgcgaacttcctgacgaactgctggcgctggtggacattattacgccaaacgaaacggaagcagaaaagctcaccggtattcgtgttgaaaatgatgaagatgcagcgaaggcggcgcaggtactgcatgaaaaaggtatccgtactgtactgattactttaggaagtcgtggtgtatgggctagcgtgaatggtgaaggtcagcgcgttcctggattccgggtgcaggctgtcgataccattgctgccggagatacctttaacggtgcgttaatcacggcattgctggaagaaaaaccattgccagaggcgattcgttttgcccatgctgccgctgcgattgccgtaacacgtaaaggcgcacaaccttccgtaccgtggcgtgaagagatcgacgcatttttagacaggcagaggtgacgcttggctacaatgaaagatgttgcccgcctggcgggcgtttctaccagtacagtttctcacgttatcaataaagatcgcttcgtcagtgaagcgattaccgccaaagttgaagcggcgattaaagaactcaattacgcgccaagtgctctggcgcgtagcctcaaactcaatcaaacacataccattggcatgttgatcactgccagtaccaatcctttctatagtgaactggtgcgtggcgttgaacgcagctgcttcgaacgcggttatagtctcgtcctttgcaataccgaaggcgatgaacagcggatgaatcgcaatctggaaacgctgatgcaaaaacgcgttgatggcttgctgttactgtgcaccgaaacgcatcaacctagccgtgaaatcatgcaacgttatccgacagtgcctactgtgatgatggactgggctccgttcgatggcgacagcgatcttattcaggataacagcttgctgggcggagacttagcaacgcaatatctgatcgataaaggtcatacccgtatcgcctgtattaccggcccgctggataaaactccggcgcgcctgcggttggaaggttatcgggcggcgatgaaacgtgcgggtctcaacattcctgatggctatgaagtcactggtgattttgaatttaacggcgggtttgacgctatgcgccaactgctaagtcatccgctgcgtcctcaggccgtctttaccggaaatgacgctatggctgttggcgtttaccaggcgttatatcaggcagagttacaggttccgcaggatatcgcggtgattggctatgacgatatcgaactggcaagctttatgacgccaccattaaccactatccaccaaccgaaagatgaactgggggagctggcgattgatgtactcatccatcggataacccagccgacccttcagcaacaacgattacaacttactccgattctgatggaacgcggtagcgcttaattactcgctttcacttggaacgcggttcggcttagatttacgctgtcttttgatcaaattattaccatcggttgttttcagaagcatgaacattgctgcactagcaacagtaataatgcccattgtgataaacgtatagtggaattgttcgacagtcgttgtgccttccattccttcataaacgcgaaggacggccgcacttacagcaacgcctaaactaatgctcagttgctgcgtgaccgccagaacactgttaccgctgctggcattgtcatcggtcagatcggcaagtgtgatggtattcatcgcggtaaactgcgtgctcatagccatccctaatataaacaacggcaagatcagcatccatatagccattgctggactttgcaaagagaactgagcgatcattagcccaataatcaccgtgatccccactaacgtatggcgatagcccagacgacgtaagacttgggtaaccatgctttttgcaataatggaacctaacgctgtcggtgccatcatacagccagcaataaacgcctgataaccaaatcctacctgtaacatcaatggcataaggaacggtacacagccggtccccagacgggttgcaatattgcctacgataccgatgctgaaagtgcgggttttaaataaatctaaactaattaatgggtttggcgtgcgtcgtgcatggagaatatagagaagcagtaacccgatgctggtgacaattaccgtcaaggcaatccagctggcgacaatcttttccccgaatagctctattccgctactgaagagaacaaggctgaggccaaacagcaaaaagccagtgatatcgaatctgcgtcgtgcggtggtgaaattgggcatatgtttgcgcgcgtaaagaaggcccgcaatacctatggggatattgattaaaaatatccagtgccaggttgcccaggtgaccagcacgccgccaagaacggggcctaaaattggccccaccagacccggcatggcgacaaaattcaatactggaagaagttcattacgaggataagcgcgcagtaaggccagccgagcaacaggcatcatcattgcgccgcctatcccctgaataacccggaagacaaccagctgtggtaggctattagaaagtgcgcaggccagagaacccaatgtgaacagactcacggcaagggtaaaaatgcgacgcgtaccgaagcgatcggctagccatccgcttaccggaataagcatcgccaccgtcagcgtataactgatgatggcactttgcatcgcgagaggagaacgattaaggctatgagcgattgcgggtaaggcggtattaagaatagtggcatcaagtgcctgcatgaagaaggccatcgccgcgatccacggcaaacccgccatactgcgcttctttttatcgctcattcaatgtcctgttatcgggttatcacttatcaggactgcgtagcagcgcctgacaagctttaaatgccgcgtcgccatcgctttggataatcgcatcgacaatcgcctgatgcagatccagctttatcactgtgtcgctggtaatactcgtgaagtaagtgtgataaacgctatggaataggctggcgaaactggtcaaaaacggattggcgctcatttcatagatatgctcatgccaggccatatcgacttcgatccagcgttcacggcgaaagttctcttttaatgccgccatttcggccattaacgtattgagatgcgctttctgttccgcggtgccaaccgttgctgccagtaggcaggcttgcggctccagacagatacgcataaccagaaagtgatcgatgacctgatgaaagttctcttctgtcatccaccaggtaagcaattcctgatcaagaaaattccagttgctttgtggcatgacccgagtaccaattcgcggtcgcggtaaaaccatcccttttgccgttaacgttttgaccgcttcgcgtaccgctgtacgactcactccaaattgctcgcccagctcaatctcaccgggcaaaatggtgccgggttcatattcaccttttaagatccgttgcgccagcttctcagccagaacatagctaaggtttttctgtgcagctaactgttgtgcgcttaaaggcattacttatcttcctttttctttttattcctccttagtatgccaccaggaagtgtgattacggttgcaaaaacggcaaattgcttgttttatggcacattaacggggcttttgctgaaaaaatgcgcggtcagaaaattattttaaatttcctcttgtcaggccggaataactccctataatgcgccaccactgacacggaacaacggcaaacacgccgccgggtcagcggggttctcctgagaactccggcagagaaagcaaaaataaatgcttgactctgtagcgggaaagcgtattatgcacaccccgcgccgctgagaaaaagcaaagcggcactgctctttaacaatttatcagacaatctgtgtgggcactcgaagatacggattcttaacgtcgcaagacgaaaaatgaataccaagtctcaagagtgaacacgtaattcattacgaagtttaattctttgagcatcaaacttttaaattgaagagtttgatcatggctcagattgaacgctggcggcaggcctaacacatgcaagtcgaacggtaacaggaaacagcttgctgtttcgctgacgagtggcggacgggtgagtaatgtctgggaaactgcctgatggagggggataactactggaaacggtagctaataccgcataacgtcgcaagaccaaagagggggaccttcgggcctcttgccatcagatgtgcccagatgggattagctagtaggtggggtaacggctcacctaggcgacgatccctagctggtctgagaggatgaccagccacactggaactgagacacggtccagactcctacgggaggcagcagtggggaatattgcacaatgggcgcaagcctgatgcagccatgccgcgtgtatgaagaaggccttcgggttgtaaagtactttcagcggggaggaagggagtaaagttaatacctttgctcattaacgttacccgcagaagaagcatcggctaactccgtgccagcagccgcggtaatacggagggtgcaagcgttaatcggaattactgggcgtaaagcgcacgcaggcggtttgttaagtcagatgtgaaatccccgggctcaacctgggaactgcatctgatactggcaagcttgagtctcgtagaggggggtagaattccaggtgtagcggtgaaatgcgtagagatctggaggaataccggtggcgaaggcggccccctggacgaagactgacgctcaggtgcgaaagcgtggggagcaaacaggattagataccctggtagtccacgccgtaaacgatgtcgacttggaggttgtgcccttgaggcgtggcttccggagctaacgcgttaagtcgaccgcctggggagtacggccgcaaggttaaaactcaaatgaattgacgggggcccgcacaagcggtggagcatgtggtttaattcgatgcaacgcgaagaaccttacctggtcttgacatccacggaagttttcagagatgagaatgtgccttcgggaaccgtgagacaggtgctgcatggctgtcgtcagctcgtgttgtgaaatgttgggttaagtcccgcaacgagcgcaacccttatcctttgttgccagcggtccggccgggaactcaaaggagactgccagtgataaactggaggaaggtggggatgacgtcaagtcatcatggcccttacgaccagggctacacacgtgctacaatggcgcatacaaagagaagcgacctcgcgagagcaagcggacctcataaagtgcgtcgtagtccggattggagtctgcaactcgactccatgaagtcggaatcgctagtaatcgtggatcagaatgccacggtgaatacgttcccgggccttgtacacaccgcccgtcacaccatgggagtgggttgcaaaagaagtaggtagcttaaccttcgggagggcgcttaccactttgtgattcatgactggggtgaagtcgtaacaaggtaaccgtaggggaacctgcggttggatcacctccttaccttaaagaagcgttctttgcagtgctcacacagattgtctgataggaagtgaaaagcaaggcgtcttgcgaagcagactgatacgtccccttcgtctagaggcccaggacaccgccctttcacggcggtaacaggggttcgaatcccctaggggacgccacttgctggtttgtgagtgaaagtcacctgccttaatatctcaaaactcatcttcgggtgatgtttgagatatttgctctttaaaaatctggatcaagctgaaaattgaaacactgaacaacgaaagttgttcgtgagtctctcaaattttcgcaacacgatgatgaatcgaaagaaacatcttcgggttgtgaggttaagcgactaagcgtacacggtggatgccctggcagtcagaggcgatgaaggacgtgctaatctgcgataagcgtcggtaaggtgatatgaaccgttataaccggcgatttccgaatggggaaacccagtgtgtttcgacacactatcattaactgaatccataggttaatgaggcgaaccgggggaactgaaacatctaagtaccccgaggaaaagaaatcaaccgagattcccccagtagcggcgagcgaacggggagcagcccagagcctgaatcagtatgtgtgttagtggaagcgtctggaaaggcgcgcgatacagggtgacagccccgtacacaaaaatgcacatattgtgagctcgatgagtagggcgggacacgtggtatcctgtctgaatatggggggaccatcctccaaggctaaatactcctgactgaccgatagtgaaccagtaccgtgagggaaaggcgaaaagaaccccggcgaggggagtgaaaaagaacctgaaaccgtgtacgtacaagcagtgggagcacgcttaggcgtgtgactgcgtaccttttgtataatgggtcagcgacttatattctgtagcaaggttaaccgaataggggagccgaagggaaaccgagtcttaactgggcgttaagttgcagggtatagacccgaaacccggtgatctagccatgggcaggttgaaggttgggtaacactaactggaggaccgaaccgactaatgttgaaaaattagcggatgacttgtggctgggggtgaaaggccaatcaaaccgggagatagctggttctccccgaaagctatttaggtagcgcctcgtgaattcatctccgggggtagagcactgtttcggcaagggggtcatcccgacttaccaacccgatgcaaactgcgaataccggagaatgttatcacgggagacacacggcgggtgctaacgtccgtcgtgaagagggaaacaacccagaccgccagctaaggtcccaaagtcatggttaagtgggaaacgatgtgggaaggcccagacagccaggatgttggcttagaagcagccatcatttaaagaaagcgtaatagctcactggtcgagtcggcctgcgcggaagatgtaacggggctaaaccatgcaccgaagctgcggcagcgacgcttatgcgttgttgggtaggggagcgttctgtaagcctgcgaaggtgtgctgtgaggcatgctggaggtatcagaagtgcgaatgctgacataagtaacgataaagcgggtgaaaagcccgctcgccggaagaccaagggttcctgtccaacgttaatcggggcagggtgagtcgacccctaaggcgaggccgaaaggcgtagtcgatgggaaacaggttaatattcctgtacttggtgttactgcgaaggggggacggagaaggctatgttggccgggcgacggttgtcccggtttaagcgtgtaggctggttttccaggcaaatccggaaaatcaaggctgaggcgtgatgacgaggcactacggtgctgaagcaacaaatgccctgcttccaggaaaagcctctaagcatcaggtaacatcaaatcgtaccccaaaccgacacaggtggtcaggtagagaataccaaggcgcttgagagaactcgggtgaaggaactaggcaaaatggtgccgtaacttcgggagaaggcacgctgatatgtaggtgaagcgacttgctcgtggagctgaaatcagtcgaagataccagctggctgcaactgtttattaaaaacacagcactgtgcaaacacgaaagtggacgtatacggtgtgacgcctgcccggtgccggaaggttaattgatggggtcagcgcaagcgaagctcttgatcgaagccccggtaaacggcggccgtaactataacggtcctaaggtagcgaaattccttgtcgggtaagttccgacctgcacgaatggcgtaatgatggccaggctgtctccacccgagactcagtgaaattgaactcgctgtgaagatgcagtgtacccgcggcaagacggaaagaccccgtgaacctttactatagcttgacactgaacattgagccttgatgtgtaggataggtgggaggctttgaagtgtggacgccagtctgcatggagccgaccttgaaataccaccctttaatgtttgatgttctaacgtggacccgtgatccgggttgcggacagtgtctggtgggtagtttgactggggcggtctcctcctaaagagtaacggaggagcacgaaggttggctaatcctggtcggacatcaggaggttagtgcaatggcataagccagcttgactgcgagcgtgacggcgcgagcaggtgcgaaagcaggtcatagtgatccggtggttctgaatggaagggccatcgctcaacggataaaaggtactccggggataacaggctgataccgcccaagagttcatatcgacggcggtgtttggcacctcgatgtcggctcatcacatcctggagctgaagtaggtcccaagggtatggctgttcgccatttaaagtggtacgcgagctgggtttagaacgtcgtgagacagttcggtccctatctgccgtgggcgctggagaactgaggggggctgctcctagtacgagaggaccggagtggacgcatcactggtgttcgggttgtcatgccaatggcactgcccggtagctaaatgcggaagagataagtgctgaaagcatctaagcacgaaacttgccccgagatgagttctccctgactccttgagagtcctgaaggaacgttgaagacgacgacgttgataggccgggtgtgtaagcgcagcgatgcgttgagctaaccggtactaatgaaccgtgaggcttaaccttacaacgccgaagatgttttggcggatgagagaagattttcagcctgatacagattaaatcagaacgcagaagcggtctgatgaaacagaatttgcctggcggccgtagcgcggtggtcccacctgaccccatgccgaactcagaagtgaaacgccgtagcgccgatggtagtgtggggtctccccatgcgagagtagggaactgccaggcatcaaattaagcagtaagccggtcataaaaccggtggttgtaaaagaattcggtggagcggtagttcagtcggttagaatacctgcctgtcacgcagggggtcgcgggttcgagtcccgtccgttccgccaccctaattaggggcgtagttcaattggtagagcaccggtctccaaaaccgggtgttgggagttcgagtctctccgcccctgccagaaatcatccttagcgaaagctaaggattttttttatctgaaataaccctctccgaagtaaatccttctaccggcatccttgccagccattcatattaatacacttcatccagcacgttaattttcaaaagatcgcgaatcaacgcatttttatcgctattttgcagccatatggcataaagcggccgactaagtgttgtgctatcgacaacggtatgcaggccgccttttttacgcgcccagctgacgggtagccaggtgcaaccattaagcatcgcaatctgttgctgtgccagttcagcagaactggttgtcagaatgggcacttcgtcagcaccgatcaaacctgcctcatgctgttgaaaatctggcccccactcaagtcgcagataattaagatctccctttagtttactaggggcactggtataaagcgctaaagtgaaatatcccagcaactgactactaaattcgtccattttgggcgcttcagtggtaataagaagatcaagctggcgttcatgcagctgttttaccagagactgccgttgggcaattcgcgcttcgaactgtaagcctgtatgggcatcctgattttgatacaagcgtcccagccactgattaagcatacattcccacaagctggcgctggcaccgatagaaaactcgttatgtcgactggtatgcgccacctccttacgggcggcctgccaggtgctcatgagcgtttctgcataaggcagtagtttttcaccggcagcggttaaacggatattgtttctgtggcgggtgaaaaggttcacacccagttgattttccagttgtctgattcgaaagctcactgcactctgggtcagatagaggctttcagccgctcgaccaaagtgacgcgttcggctaacttccaggaaagtttttaacaattccgtatccacagtgctctccgcaaaattatttgtcgttatgatttaaatgttttgttttacactctgtcaagcgtaactaatactccgcgccataactagctcggtcaaagaattaggagcgtgcaggatggcggaaagctttacgacgactaatcgatatttcgacaataaacattatccacgtggattctctcgtcatggtgatttcaccatcaaagaggcacaactgcttgagcgtcatggttatgccttcaatgagttggatcttggcaaacgcgagccggttaccgaggaagagaaactcttcgtagcagtatgccgtggcgaacgtgagccagtgacagaagcagaacgcgtgtggtccaagtatatgacgcgtattaagcgtccaaaacgttttcacaccctttccggcggtaaaccgcaggttgaaggtgctgaagactacaccgattctgacgattaataaaaagggcgaaatgccctttttttatgtcagtagtttctgcagatggatgagcaaacggtcaatcgctcgatagctaactgcctcctgcaaatgctgacgtgtgataatgtcagactgatcaatatcagcaatggttcgtgcaactttcaataaccgctgccaggcacgaatgcttaaccccagatggatcagtgttccttccaaccacatcgcatcttcgctctcaagtttgcagaattggcgtatttccggactatccagccaggcattcagtttattctgccgcttaaattggcgctctctggcggccattacgcgttgtttaacggtggcgctgctttctcccggcactaccgttttactcaaaatgccggggggtggtaatgggatctccagactgagatcgaagcggtcgagaaagggcccgctgagccggttgagataacgtaatgtctgttctggcgtgcagcggttatggtttccctgataatgtccggtagggctgggattcatcgccgcaacaagctggaaacgggctggataggttatttttgctcgtgtgcgactaagatggatctgcccggattcaatcggctctcgcaaggcatccagtgtacgccgttcaaattcaggtagctcatcaagaaaaagcacgccgttatgcgccaggctaatttcaccgggccctggaattgcgccaccgcctaccatcgcagttaagcttgcactgtgatgaggactgcggaacgggcgctgccgccattgtttttgtacactttcagcatttaccagacttaatatcgcagcactctccagtgcctcttcattgcttaaatctggcaacaggccattaatacggctggcgagcattgttttacctgttcccggcggcccaatcagtaaaaggttgtgcccgccagcagcggtaatttccagtcctcgctttccttgttcctgaccgataacatcactgagatcatgttgtagcgcccgggatactgcatcagttggtttcgggcgttcgagagcgtgcttaccttccagaaacgcacagacagcttgcagatgatcggctatcaggcatccttcaccgttaattagccccacttcatcttcgttatctttcgcgacgataatttttctgccgctcttaatagcttcagttgcactggagattgcgccgggaacgccacgcagagcgcctgtaagcgccagttctccgactaattcatattcatctaacttattggctgtaagctgttcactggccgccagcaacgcaatggcgataggtaaatcatatcgtcccccttcttttggcagatcagctggagccaggttgatggtgatttttttcgccggatattcatatccgctattgataatggcgctgcgcacgcgatcgcgagcttcttttaccgttgtttctggtaagcccaccatcgttaagccgggtagacctttactgatatgtacctcaacagtgatcgggggcgcatttactcccagggctgcgcgggtatgaacaatactcagactcataagccctccttgagtcaccattatgtgcataagatatcgctgctgtagcccgctaattcgtgaattttagtggctgattcctgtttatttgtgcaagtgaagttgagttgttctggcggtggaatgatgctcgcaaaaatgcagcggacaaaggatgaactacgaggaagggaacaacattcatactgaaattgaatttttttcactcactattttatttttaaaaaacaacaatttatattgaaattattaaacgcatcataaaaatcggccaaaaaatatcttgtactatttacaaaacctatggtaactctttaggcattccttcgaacaagatgcaagaaaagacaaaatgacagcccttctacgagtgattagcctggtcgtgattagcgtggtggtgattattatcccaccgtgcggggctgcacttggacgaggaaaggcttaaagatcaagccttaacgaactaagacccccgcaccgaaaggtccgggggttttttttgaccttaaaaacataaccgaggagcagacaatgaataacagcacaaaattctgtttctcaagattcaggacggggaactaactatgaatggcgcacagtgggtggtacatgcgttgcgggcacagggtgtgaacaccgttttcggttatccgggtggcgcaattatgccggtttacgatgcattgtatgacggcggcgtggagcacttgctatgccgacatgagcagggtgcggcaatggcggctatcggttatgctcgtgctaccggcaaaactggcgtatgtatcgccacgtctggtccgggcgcaaccaacctgataaccgggcttgcggacgcactgttagattccatccctgttgttgccatcaccggtcaagtgtccgcaccgtttatcggcactgacgcatttcaggaagtggatgtcctgggattgtcgttagcctgtaccaagcacagctttctggtgcagtcgctggaagagttgccgcgcatcatggctgaagcattcgacgttgcctgctcaggtcgtcctggtccggttctggtcgatatcccaaaagatatccagttagccagcggtgacctggaaccgtggttcaccaccgttgaaaacgaagtgactttcccacatgccgaagttgagcaagcgcgccagatgctggcaaaagcgcaaaaaccgatgctgtacgttggcggtggcgtgggtatggcgcaggcagttccggctttgcgtgaatttctcgctgccacaaaaatgcctgccacctgtacgctgaaagggctgggcgcagtagaagcagattatccgtactatctgggcatgctggggatgcacggcaccaaagcggcaaacttcgcggtgcaggagtgtgacctgctgatcgccgtgggcgcacgttttgatgaccgggtgaccggcaaactgaacaccttcgcgccacacgccagtgttatccatatggatatcgacccggcagaaatgaacaagctgcgtcaggcacatgtggcattacaaggtgatttaaatgctctgttaccagcattacagcagccgttaaatcaatgactggcagcaacactgcgcgcagctgcgtgatgaacattcctggcgttacgaccatcccggtgacgctatctacgcgccgttgttgttaaaacaactgtcggatcgtaaacctgcggattgcgtcgtgaccacagatgtggggcagcaccagatgtgggctgcgcagcacatcgcccacactcgcccggaaaatttcatcacctccagcggtttaggtaccatgggttttggtttaccggcggcggttggcgcacaagtcgcgcgaccgaacgataccgttgtctgtatctccggtgacggctctttcatgatgaatgtgcaagagctgggcaccgtaaaacgcaagcagttaccgttgaaaatcgtcttactcgataaccaacggttagggatggttcgacaatggcagcaactgttttttcaggaacgatacagcgaaaccacccttactgataaccccgatttcctcatgttagccagcgccttcggcatccatggccaacacatcacccggaaagaccaggttgaagcggcactcgacaccatgctgaacagtgatgggccatacctgcttcatgtctcaatcgacgaacttgagaacgtctggccgctggtgccgcctggcgccagtaattcagaaatgttggagaaattatcatgatgcaacatcaggtcaatgtaagcgctcgcttcaatccagaaaccttagaacgtgttttacgcgtggtgcgtcatcgtggtttccacgtctgcagtatgaatatggccgccgccagcgatgcacaaaatataaatatcgaattgaccgttgccagcccacggagcgtcgacttactgtttagtcagttaaataaactggtggacgtcgcacacgttgccatctgccagagcacaaccacaagtcaacaaatccgcgcctgagcgcaaaaggaatataaaaatgaccacgaagaaagctgattacatttggttcaatggggagatggttcgctgggaagacgcgaaggtgcatgtgatgagccacgcgctgcactatggcactagcgtttttgaaggcatccgttgctacgacagccacaaaggaccggttgtattccgccatcgtgagcatatgcagcgtctgcatgactccgccaaaatctatcgcttcccggttagccagagcattgatgagctgatggaagcttgtcgtgacgtgatccgcaaaaacaatctcaccagcgcctatatccgtccgctgatcttcgtcggtgatgttggcatgggagtaaacccgccagcgggatacagtaccgacgtgattatcgctgctttcccgtggggagcgtatctgggcgcagaagcgctggagcaggggatcgatgcgatggtttcctcctggaaccgcgcagcaccaaacaccatcccgacggcggcaaaagccggtggtaactacctctcttccctgctggtgggtagcgaagcgcgccgccacggttatcaggaaggtatcgcgctggatgtgaacggttatatctctgaaggcgcaggcgaaaacctgtttgaagtgaaagatggtgtgctgttcaccccaccgttcacctcctccgcgctgccgggtattacccgtgatgccatcatcaaactggcgaaagagctgggaattgaagtacgtgagcaggtgctgagccgcgaatccctgtacctggcggatgaagtgtttatgtccggtacggcggcagaaatcacgccagtgcgcagcgtagacggtattcaggttggcgaaggccgttgtggcccggttaccaaacgcattcagcaagccttcttcggcctcttcactggcgaaaccgaagataaatggggctggttagatcaagttaatcaataaatacaaaaaatgggacggcacgcaccgtcccatttacgagacagacactgggagtaaataaagtatgcctaagtaccgttccgccaccaccactcatggtcgtaatatggcgggtgctcgtgcgctgtggcgcgccaccggaatgaccgacgccgatttcggtaagccgattatcgcggttgtgaacagcttcacccaatttgtaccgggtcacgtccatctgcgcgatctcggtaaactggtcgccgaacaaattgaagcggctggcggcgttgccaaagagttcaacaccattgcggtggatgatgggattgccatgggccacggggggatgctttatagtctgccatctcgcgaactgatcgctgattccgttgagtatatggtcaacgcccactgcgccgacgccatggtctgcatctctaactgcgacaaaatcaccccggggatgctgatggcttccctgcgcctgaatattccggtgatctttgtttccggcggcccgatggaggccgggaaaaccaaactttccgatcagatcatcaagctcgatctggttgatgcgatgatccagggcgcagacccgaaagtatctgactcccagagcgatcaggttgaacgttccgcgtgtccgacctgcggttcctgctccgggatgtttaccgctaacagtatgaactgcctgaccgaagcgctgggcctgagccagccgggcaacggcagcctgctggcaacccacgccgaccgtaagcagctgttccttaatgctggtaaacgcattgttgaattgaccaaacgttattacgagcaaaacgacgaaagtgcactgccgcgtaatatcgccagtaaggcggcgtttgaaaacgccatgacgctggatatcgcgatgggtggaagcactaacaccgtacttcacctgctggcggcggcgcaggaagcggaaatcgacttcaccatgagtgatatcgataagctttcccgcaaggttccacagctgtgtaaagttgcgccgagcacccagaaataccatatggaagatgttcaccgtgctggtggtgttatcggtattctcggcgaactggatcgcgcggggttactgaaccgtgatgtgaaaaacgtacttggcctgacgttgccgcaaacgctggaacaatacgacgttatgctgacccaggatgacgcggtaaaaaatatgttccgcgcaggtcctgcaggcattcgtaccacacaggcattcagccaagattgccgttgggatacgctggacgacgatcgcgccaatggctgtatccgcagcctggaacacgcctacagcaaagacggcggcctggcggtgctctacggtaactttgcggaaaacggctgcatcgtgaaaacggcaggcgtcgatgacagcatcctcaaattcaccggcccggcgaaagtgtacgaaagccaggacgatgcggtagaagcgattctcggcggtaaagttgtcgccggagatgtggtagtaattcgctatgaaggcccgaaaggcggtccggggatgcaggaaatgctctacccaaccagcttcctgaaaagtatgggtctcggcaaagcctgtgcgctgatcaccgacggtcgtttctctggtggcacctctggtctttccatcggccacgtcagtccggaagcggcaagcggcggcagcattggcctgattgaagatggtgacctgatcgctatcgacatcccgaaccgtggcattcagttacaggtaagcgatgccgaactggcggcgcgtcgtgaagcgcaggacgctcgaggtgacaaagcctggacgccgaaaaatcgtgaacgtcaggtctcctttgccctgcgtgcttatgccagcctggcaaccagcgccgacaaaggcgcggtgcgcgataaaagcaaactggggggttaataatggctgacagccaacccctgtccggtgctccggaaggtgccgaatatttaagagcagtgctgcgcgcgccggtttacgaggcggcgcaggttacgccgctacaaaaaatggaaaaactgagcagccgtcttgataacgtcattctggtgaagcgcgaagatcgccagccagtgcacagctttaagctgcgcggcgcatacgccatgatggcgggcctgacggaagaacagaaagcgcacggcgtgatcactgcttctgcgggtaaccacgcgcagggcgtcgcgttttcttctgcgcggttaggcgtgaaggccctgatcgttatgccaaccgccaccgccgacatcaaagtcgacgcggtgcgcggcttcggcggcgaagtgctgctccacggcgcgaactttgatgaagcgaaagccaaagcgatcgaactgagtcagcagcaggggttcacctgggtgccgccgttcgaccatccgatggtgattgccgggcaaggcacgctggcgctggaactgctccagcaggacgcccatctcgaccgcgtatttgtgccagtcggcggcggcggtctggctgctggcgtggcggtgctgatcaaacaactgatgccgcaaatcaaagtgatcgccgtagaagcggaagactccgcctgcctgaaagcagcgctggatgcgggtcatccggttgatctgccgcgcgtagggctatttgctgaaggcgtagcggtaaaacgcatcggtgacgaaaccttccgtttatgccaggagtatctcgacgacatcatcaccgtcgatagcgatgcgatctgtgcggcgatgaaggatttattcgaagatgtgcgcgcggtggcggaaccctctggcgcgctggcgctggcgggaatgaaaaaatatatcgccctgcacaacattcgcggcgaacggctggcgcatattctttccggtgccaacgtgaacttccacggcctgcgctacgtcagtgaacgctgcgaactgggcgaacagcgtgaagcgttgttggcggtgaccattccggaagaaaaaggcagcttcctcaaattctgccaactgcttggcgggcgtagcgtcaccgagttcaactaccgttttgccgatgccaaaaacgcctgcatctttgtcggtgtgcgcctgagccgcggcctcgaagagcgcaaagaaattttgcagatgctcaacgacggcggctacagcgtggttgatctctccgacgacgaaatggcgaagctacacgtgcgctatatggtcggcggacgtccaagccatccgttgcaggaacgcctctacagcttcgaattcccggaaagtccgggcgcgctgctgcgcttcctcaacacgctgggtacgtactggaacatttctttgttccactatcgcagccatggcaccgactacgggcgcgtactggcggcgttcgaacttggcgaccatgaaccggatttcgaaacccggctgaatgagctgggctacgattgccacgacgaaaccaataacccggcgttcaggttctttttggcgggttaaggaaaaatgcctgatagcgcttcgcttatcaggcctacccgcgcgacaacgtcatttgtggttcggcaaaatcttccagaatgcctcaattagcggctcatgtagccgctttttctgcgcacacacgcccagctcaaacggcgttttctcatcgctgcgctctaaaatcatcacgcggttacgcaccggttcggggctgttttccagcaccacttccggcaacaatgccacgccacagccgagtgccaccatgcttaccatcgcttcatgcccgccaaccgtggcgtaaatcatcgggttactgattttattgcgtcgaaaccacagttcaatgcggcggcgtaccggcccctgatcggccataataaacggcaccgtactccagtccggcttctctacgctcacctgattacgcaccgggcagggcagcgcgggggcaatcagcactactgccagattctccagcatgctaaacgccactgcgccgggcaaggtttccggtttacccgcaatcgccagatccgcttcaccagtgaccaccttttccatcgcatctgccgcatcaccagtagtaagtttaatctccacgctcgggtgttccgcgcggaagcgatccagaatcggcggcagatggctgtaggcagcggtcacgctgcagaagatatgtaattcgccagagaggctcggcccttgctgatcgatggtgtggcgcaactgctgatactgcaacagcgtttgctgggcgaaaacgcgcagctcttcgcccgcttcagtcagcgtcaccgtgcggttatcgcgcacaaacagcggctgaccgagatcttcttccaggcgctgaatctgccgactgagcgtggatgggctaacgtgcatcgcccgcgcgctgcggccaaaatggcggctttccgccagatgcaggaaggttttcagatcgcgtaaatccacagggacagccctcgatgttgacgttgcaaaaattgcaatgtgacgttgtgaatatatcaatttccgcaataaatttcctgtcatatagtgaattcaatctcgcaaacgcgaaccgaacaataagaagcacaacatcacgaggaatcaccatggctaactacttcaatacactgaatctgcgccagcagctggcacagctgggcaaatgtcgctttatgggccgcgatgaattcgccgatggcgcgagctaccttcagggtaaaaaagtagtcatcgtcggctgtggcgcacagggtctgaaccagggcctgaacatgcgtgattctggtctcgatatctcctacgctctgcgtaaagaagcgattgccgagaagcgcgcgtcctggcgtaaagcgaccgaaaatggttttaaagtgggtacttacgaagaactgatcccacaggcggatctggtgattaacctgacgccggacaagcagcactctgatgtagtgcgcaccgtacagccactgatgaaagacggcgcggcgctgggctacagccacggtttcaacatcgtcgaagtgggcgagcagatccgtaaagatatcaccgtagtgatggttgcgccgaaatgcccaggcaccgaagtgcgtgaagagtacaaacgtgggttcggcgtaccgacgctgattgccgttcacccggaaaacgatccgaaaggcgaaggcatggcgattgccaaagcctgggcggctgcaaccggtggtcaccgtgcgggtgtgctggaaagctccttcgttgcggaagtgaaatctgacctgatgggcgagcaaaccatcctgtgcggtatgttgcaggctggctctctgctgtgcttcgacaagctggtggaagaaggtaccgatccagcatacgcagaaaaactgattcagttcggttgggaaaccatcaccgaagcactgaaacagggcggcatcaccctgatgatggaccgtctctctaacccggcgaaactgcgtgcttatgcgctttctgaacagctgaaagagatcatggcacccctgttccagaaacatatggacgacatcatctccggcgaattctcttccggtatgatggcggactgggccaacgatgataagaaactgctgacctggcgtgaagagaccggcaaaaccgcgtttgaaaccgcgccgcagtatgaaggcaaaatcggcgagcaggagtacttcgataaaggcgtactgatgattgcgatggtgaaagcgggcgttgaactggcgttcgaaaccatggtcgattccggcatcattgaagagtctgcatattatgaaagtctgcacgagctgccgctgattgccaacaccatcgcccgtaagcgtctgtacgaaatgaacgtggttatctctgataccgctgagtacggtaactatctgttctcttacgcttgtgtgccgttgctgaaaccgtttatggcagagctgcaaccgggcgacctgggtaaagctattccggaaggcgcggtagataacgggcaactgcgtgatgtgaacgaagcgattcgcagccatgcgattgagcaggtaggtaagaaactgcgcggctatatgacagatatgaaacgtattgctgttgcgggttaagtgcgcgctgatgccctcaccccgaccctctcccacagggagagggagaaaacactcaaggccttctcctggagaaggccttgctattagttgcggtacagcaccttaatgatgtgatatccgaactgggtgtgcagcgggccggtcggctccagtaccggacaagagaaaaccactttatcgaacgccggaaccatctgaccctggcggaattcacctaaatcaccgccgcgtttgccacttgggcaaatggagtgtttcttcgccagcttgccgaaatcggccccgttcttaatctgctcgagaagatccagagccagtttctcttcttttacaaggatatgcagtgctgctgctgtttttgccatgatcgtgccttgagtgaataattgtcaggcggcgattttagcatgatccgcagatgctaacgtaattgtcagtcagggagtggctggtacatatatggcaaaagcccggaaaatccgggcttcgcaggtccctcaaggggagaaaacttagggcctctatgggctacaaagtcattatcggggatggttattttattgtcaatttatgaggcttatggcattgatactcttgatgaccgccctctgtatgtctgcaaccaactcatgtggcaaacattgattaagataccctctgtaagtccttgctctgtttaatctgtttcgactgacttgttgtaccaggtcggctttggcccaacgaatctgctgatcaaagaattgcaggtcattgataacattactggctatttcaacatgcattccacgttttaacttgtctggtcggctgtggttgataatggaacgacgatgcatgcgttgccattaatttttccgttgagcacgacaactaacctgttttttatcatttcaggaggaatgcggccatcgtaatacgtcgtgctgaacggtccattttggctaacaggatagttaccaaagttgcattccagtatttcaccaaccttagggctgaaattaatcgccacgagtaaacctctccttagtaaactctgaaaaagtaataacacaacgttacgacccgatattttctaagtctaatggattcacgatgaactccgatttcggtcttctctctctgatttaaacatccgcagccaaccggttagcggcttacacgcggtcacattcaaatgcgattctgctacaatcctccccccgttcgaagattgagcaatacacctatgcgtctaaaccccggccaacaacaagctgtcgaattcgttaccggcccctgcctggtgctggcgggcgcgggttccggtaaaactcgtgttatcaccaataaaatcgcccatctgatccgcggttgcggttatcaggcgcggcacattgcggcggtgacctttactaataaagcagcgcgcgagatgaaagagcgtgtagggcagacgctggggcgcaaagaggcgcgtgggctgatgatctccactttccatacgttggggctggatatcatcaaacgcgagtatgcggcgcttgggatgaaagcgaacttcagcttgtttgacgataccgatcagcttgctttgcttaaagagttgaccgaggggctgattgaagatgacaaagttctcctgcaacaactgattagcaccatctctaactggaagaatgatctcaaaacaccgtcccaggcggcagcaagtgcgattggcgagcgggaccgtatttttgcccattgttatgggctgtatgatgcacacctgaaagcctgtaacgttctcgacttcgatgatctgattttattgccgacgttgctgctgcaacgcaatgaagaagtccgcaagcgctggcagaacaaaattcgctatctgctggtggatgagtatcaggacaccaacaccagccagtatgagctggtgaaactgctggtgggcagccgcgcgcgctttaccgtggtgggtgacgatgaccagagcatctactcctggcgcggtgcacgtccgcaaaacctggtgctgctgagtcaggattttccggcgctgaaggtgattaagcttgagcagaactatcgctcttccgggcgtattctgaaagcggcgaacatcctgatcgccaataacccgcacgtctttgaaaagcgtctgttctccgaactgggttatggcgcggagctaaaagtattaagcgcgaataacgaagaacatgaggctgagcgcgttactggcgagctgatcgcccatcacttcgtcaataaaacgcagtacaaagattacgccattctttatcgcggtaaccatcagagccgggtgtttgaaaaattcctgatgcaaaaccgcatcccgtacaaaatatctggtggtacgagctttttctctcgtcctgaaatcaaggacttgctggcttatctgcgcgtgctgactaacccggacgatgacagcgcatttctgcgtatcgttaacacgccgaagcgagagattggcccggctacgctgaaaaagctgggtgagtgggcgatgacgcgcaataaaagcatgtttaccgccagctttgatatgggcctgagtcagacgcttagcggacgtggttatgaagcattgacccgcttcactcactggttggcagaaatccagcgtctggcggagcgggagccgattgccgcggtgcgtgatctgatccatggcatggattatgaatcctggctgtacgaaacaagccccagcccgaaagccgccgaaatgcgcatgaagaacgtcaaccaactgtttagctggatgacggagatgctggaaggcagtgaactggatgagccgatgacgctcacccaggtggtgacgcgctttactttgcgcgacatgatggagcgtggtgagagtgaagaagagctggatcaggtgcaactgatgactctccacgcgagcaaagggctggagtttccttatgtctacatggtcggtatggaagaagggtttttgccgcaccagagcagcatcgatgaagataatatcgatgaggagcggcggctggcctatgtcggcattacccgcgcccagaaggaattgacctttacgctgtgtaaagaacgccgtcagtacggcgaactggtgcgcccggagccgagccgctttttgctggagctgccgcaggatgatctgatttgggaacaggagcgcaaagtggtcagcgccgaagaacggatgcagaaagggcaaagccatctggcgaatctgaaagcgatgatggcggcaaaacgagggaaataatcaaggccggaaaagatgcgtcagcatcgcatccggcacttactcattaatgcacttccagcggccagtggacatagctctgccactggctttcctgagcaataatctctttacccagcggatgttgggttagccaaccttgcggaagcgtcaaggtcaacagttcatggttagcctgtaatgtcatctctggcacgagatcgtcacggcgacggctggcaaaaatgatggccaggcgtagtaaacggcagagttgttctgcgacgcgcggcggtacggcattttgctgatgcaggctactgagatcgaccggattagtctggttgagcagtagcgtcgccagcaattttttctgtgcgggggtaaaaccgggaagatccagattacgcaccagataagcagcgtgttgcggcgcttgtttgaagtcaacgctcaggccgatttcatgaagctgacaggcgctgatgagcaaatcgcggcttattgcttcaagatgccattcgttttccacctgatcgaagaagttagccgcaactttggctacgcgctgtgcctgatcaatatcgatcataaagcggcgttgaatattacgcagcgtacggctgcgaatatcctgctcgacggccagatgcaacatgccgtagaccaggccttcacgcagcgcaccgcccgccagggtcatacactgaatattcagttcggtaaaaatggcgatcaggatcgccagaccactcgggaacactaacgcacgttccagcgtcagcccgtcaatctccagttcctccagccgaccgcaatgaatggctcgctgtttcaattgctgcaacttttccagggtaatgcgttcatccatcccctgtgccatcatgatttcctgtaacgcctgcacggtgccggaagcaccaacgcacactttccagccgtgataccgtaattcatcggcaaccggacgtaacacttcgcgtgccgctttttctgcagcatcaaaattttcctgccccagattacgatcggcaaaatagcgttccagccaggtgacgcagcccatgctcaggctgaacaagctggtggtttgtgcacccgtgccggttaccagttcagtactggctccgcctatatccaccaccaggcgctgatcggcaccaccagtggtgtgagcaacgccctgataaatcagacgtgcttcctcttcaccgctgatcacctgtaccggacaaccgagaatttcctgcgctttggcaataaaatcacccgcattgacggcaaggcgtaacgtcgccgtagcgacaacgcgaatttggctgggaggaatatcttgcagacgttcagcaaacaggcgcaaacattgccaaccgcgctccattgcttcattggagagggcattttcgctattcaggccagcagccagacgcactttgcgttttattcgcgtcagcgtctggatgcttccagccacctcgcgcacaaccagcatatgaaaactattgctaccgagatcaatggctgcatacaggctgctggtggaacccatactcttcatccttcaatctgtctctgtgttggctgcattctttcacctgaatcacttactacagtaagctcatcgggattcattctcttgccatcttgatacagtttgaatgattttgagtatgacattttttatttaaccactacgacgacgattacgcggagcgccagtacgacgcggaccattgcctgtgcgcgggcgcgtgaggcgcagcggttttggcagatcggtcatcaatgcgtccggattgtatttgcttaccggaatactgtgaccaatataggtctcaatagcaggcaaattcaatgcatactcttcacacgccaggctgatagagtgaccgcttgcgcctgcgcgacctgtacgaccaatacggtgaacgtaatcttcacagtcatcgggtaaatcgtagttaaagacgtgcgtcactgccggaatatgcaaaccacgcgcggcaacgtcggtggcaaccagaatatccagatcgccacgggtaaattcatcaagaatacgcagacgttttttctgcgcgacatcgcctgtcaataaaccgacacgatgaccatctgctgccaggtggccccagatctcttcacaacggtgtttggtgttggcgaaaataatcgctctgtctggccactcttcttcgatcagcgtttgcagcaaacgcattttttcttcgttagaagggtagaaaagctcttctttaatacggtggcccgttttctgttccggttccacttcaatatattcggcattgttcatctgctcgaacgccagttcacgtacccggtagctaagcgtggcggagaacagcatgttgaggcgctggtttgcaggcggcatacggcggaacagccagcggatatctttaataaagcccagatcgtacatgcgatcggcttcgtccagtaccaccacctgaatggcaccgaggttaatgtggttctgcttggcgtagtcaattaaacgccccgtggtgccaatcagaatgtcaacgccgctttccagcactttcagctgtttgtcgtagccatcaccaccgtaagccagacccagcttcaggccagtagcttccgccagcggttctgcgtcggcatggatctgcacggcaagttcacgcgtcggtgccataattaaggcacgcggctgattcaccttgcgatcggcaatcgcaggatgagagagaagataatgaaacgtactcgtaagaaacgccatcgttttcccggtaccggtttgcgcctgcccggctacgtcacgacccgccagcgtcagcggaagggccagtgcctgaatgggcgtacagttatgaaacccttttttttcaagggcttctacaaccttcggatgcagggcgaagtcggaaaacttctgttctgttaaatgtgttttgctcatagtgtggtagaatatcagcttactattgctttacgaaagcgtatccggtgaaataaagtcaacctttagttggttaatgttacaccaacaacgaaaccaacacgccaggcttattcctgtggagttatatatgagcgataaaattattcacctgactgacgacagttttgacacggatgtactcaaagcggacggggcgatcctcgtcgatttctgggcagagtggtgcggtccgtgcaaaatgatcgccccgattctggatgaaatcgctgacgaatatcagggcaaactgaccgttgcaaaactgaacatcgatcaaaaccctggcactgcgccgaaatatggcatccgtggtatcccgactctgctgctgttcaaaaacggtgaagtggcggcaaccaaagtgggtgcactgtctaaaggtcagttgaaagagttcctcgacgctaacctggcgtaagggaatttcatgttcgggtgccccgtcgctaaaaactggacgcccggcgtgagtcatgctaacttagtgttgacttcgtattaaacataccttattaagtttgaatcttgtaatttccaacgcttcccgttttatcttaaatgcgaagtgaacagatttctggcagcagtctcaatccgtcttgtcgtttcagttctgcgtactctcctgtgaccaggcagcgaaaagacatgagtcgatgaccgtaaacaggcatggatgatcctgccataccattcacaacattaagttcgagatttaccccaagtttaagaactcacaccactatgaatcttaccgaattaaagaatacgccggtttctgagctgatcactctcggcgaaaatatggggctggaaaacctggctcgtatgcgtaagcaggacattatttttgccatcctgaagcagcacgcaaagagtggcgaagatatctttggtgatggcgtactggagatattgcaggatggatttggtttcctccgttccgcagacagctcctacctcgccggtcctgatgacatctacgtttcccctagccaaatccgccgtttcaacctccgcactggtgataccatctctggtaagattcgcccgccgaaagaaggtgaacgctattttgcgctgctgaaagttaacgaagttaacttcgacaaacctgaaaacgcccgcaacaaaatcctctttgagaacttaaccccgctgcacgcaaactctcgtctgcgtatggaacgtggtaacggttctactgaagatttaactgctcgcgtactggatctggcaagtcctatcggtcgtggtcagcgtggtctgattgtggcaccgccgaaagccggtaaaaccatgctgctgcagaacattgctcagagcattgcttacaaccacccggattgtgtgctgatggttctgctgatcgacgaacgtccggaagaagtaaccgagatgcagcgtctggtaaaaggtgaagttgttgcttctacctttgacgaacccgcatctcgccacgttcaggttgcggaaatggtgatcgagaaggccaaacgcctggttgagcacaagaaagacgttatcattctgctcgactccatcactcgtctggcgcgcgcttacaacaccgttgttccggcgagtggtaaagtgttgaccggtggtgtggatgccaacgccctgcatcgtccgaaacgcttctttggtgcggcgcgtaacgtggaagagggcggcagcctgaccattatcgcgacggcgcttatcgataccggttctaaaatggacgaagttatctacgaagagtttaaaggtacaggcaacatggaactgcacctctctcgtaagatcgctgaaaaacgcgtcttcccggctatcgactacaaccgttctggtacccgtaaagaagagctgctcacgactcaggaagaactgcagaaaatgtggatcctgcgcaaaatcattcacccgatgggcgaaatcgatgcaatggaattcctcattaataaactggcaatgaccaagaccaatgacgatttcttcgaaatgatgaaacgcagttaaatttgtcttatgccaaaaacgccacgtgtttacgtggcgttttgcttttatatctgtaatcttaatgccgcgctggcgatgttaggaaaattcctggaatttgctggcatgttatgcaatttgcatatcaaatggttaatttttgcacaggactggtgggtttggaacggactttcccttctgaataaaggtcttcgtggttatacttctgctaataattttctctgagagcatgcattgtgaatttactgacagtgagtactgatctcatcagtatttttttattcacgacactgtttctgttttttgcccgtaaggtggcaaaaaaagtcggtttagtggataaaccaaacttccgcaaacgtcaccagggattgatacctctcgttggggggattagcgtttacgcagggatttgcttcacgttcggaattgtcgattactatattccgcatgcatctctctatctcgcttgtgccggtgtgcttgttttcattggcgcgctggatgaccgttttgatatcagcgtaaaaatccgtgccaccatacaggccgctgttggcattgttatgatggtgttcggcaagctttatctcagtagcctgggttatatctttggctcctgggagatggtgctcggaccgtttggttacttcctgacgctatttgccgtctgggcggccattaatgcgttcaacatggttgatggcattgatggcttgctgggcgggttgtcctgcgtcagctttgcagcaatcggtatgattttgtggttcgacgggcaaaccagcctcgcaatctggtgctttgcgatgatcgccgccatcctgccatacatcatgcttaaccttggtatcctgggtcgccgctacaaagtctttatgggtgatgcgggcagtacgctgattggttttaccgttatctggatcctgctcgaaacgacccagggcaaaacccatcccatcagcccggttaccgctttgtggataatcgccattccgctaatggatatggtggcgattatgtaccgtcgcctgcgtaaaggcatgagcccattctctcctgaccgtcagcatattcaccatttgatcatgcgtgccgggtttacttcccgtcaggcgtttgtgctgattacccttgccgcagcactgctcgcttccattggcgtgctggcagaatattctcattttgtcccggagtgggtcatgctggtgctctttttgctagcattcttcctctatggatattgcattaagcgtgcctggaaagttgctcgctttattaagcgcgtaaaacgcagactgcgtagaaatcgtggtggcagccccaatttaaccaaataaatgaggatgtgatgacacaaccaatgcctgggaaaccggccgaagacgctgaaaatgaactggatattcgtgggttgtttcgtaccttgtgggctgggaagctatggattattggcatggggctggcgtttgcgttaatcgcgctggcgtatacgttttttgctcgtcaggagtggagcagcacggcgattaccgatcgtccaacggtgaatatgctggggggatattacagccagcagcaatttttgcgtaacctggatgtccgtagtaacatggcttctgccgaccaaccaagcgtcatggacgaagcctataaagagtttgttatgcaactggccagctgggatacccgcagagagttctggctgcaaaccgactattacaaacagcggatggtgggcaacagcaaagccgatgcggcgttgctggatgaaatgattaacaacatccagtttatccccggagactttacccgcgcggtcaatgacagcgtgaagcttattgccgaaaccgcgcctgacgctaataacctgttacgtcagtatgttgcttttgccagccagcgtgcagccagccatctgaatgatgagctgaaaggcgcatgggcggcgcgtaccatccagatgaaagctcaggtgaagcgtcaggaagaggtggcgaaagccatctacgaccgccggatgaacagcattgagcaggcgctgaaaattgctgagcagcataatattagccgcagtgcgacagatgtacctgccgaggaattacctgatagtgaaatgttcctgcttgggcgtccaatgcttcaggctcgactggaaaatttacaggccgtcggtccggcctttgatctcgactatgatcagaatcgggccatgttaaacaccctgaatgttggtccaaccctggatccgcgttttcagacctatcgctatttgcgtacgccggaagaaccggtaaaacgcgatagcccacgtcgtgccttcctgatgattatgtggggcattgtcggggggctgatcggggctggtgtcgcattaacccgccgttgcagcaaataacaacactgctgcggtgagcgcaaaggcgctcgccgcttattcgaagagaatcgatgtgaaagtactgactgtatttggtacgcgcccggaagccatcaagatggcgccgttggtgcatgcgttggcaaaagatcctttttttgaggctaaagtttgcgtcactgcgcagcatcgggagatgctcgatcaggtgctgaaactcttttccattgtacctgactacgatctcaacataatgcagccaggacagggcctgacagagataacctgtcggattctggaagggctaaaacctattcttgccgagttcaaaccagacgtcgtgctggttcacggcgatacgacgacgacgctggcaaccagcctggcggcgttttatcagcgtattcctgttggtcacgttgaggctggtctgcgcacgggcgatctctatagcccgtggccggaagaggctaaccgtacattgaccgggcatctggcgatgtatcacttctctccaaccgaaacttcccggcaaaacttgctgcgtgaaaacgttgcggatagccgaatcttcattaccggtaatacagtcattgatgcactgttatgggtgcgtgaccaggtgatgagcagcgacaagctgcgtagtgaactggcggcaaattacccgtttatcgaccccgataaaaagatgattctggtgaccggtcacaggcgtgagagtttcggtcgtggctttgaagaaatctgccacgcgctggcagacatcgccaccacgcaccaggacatccagattgtctatccggtgcatctcaacccgaacgtcagagaaccggtcaatcgcattctggggcatgtgaaaaatgtcattctgatcgatccccaggagtatttaccgtttgtctggctgatgaaccacgcctggctgattttgaccgacagtggcggcattcaggaagaagcgcctagcctggggaaacctgtgctggtgatgcgcgataccactgagcgtccggaagcggtgacggcgggtacggtgcgtctggtaggcacggataagcagcgaattgtcgaggaagtgacgcgtcttttaaaagacgaaaacgaatatcaagctatgagccgcgcccataacccgtatggtgatggtcaggcatgctctcgcattctggaagcgttaaaaaataatcggataagtctatgagttttgcgaccatttctgttatcggactgggttatatcgggctgccaacggcagcagcgtttgccagtcggcaaaaacaggtaattggtgtcgatatcaaccaacatgcggttgataccatcaatcgtggcgaaatccatatcgtcgaacctgatttggcgagtgtagtaaaaactgccgtagaaggcggttttttacgagcgagcacgacgccagttgaagcggatgcctggctgattgctgtacccacgccgtttaagggcgatcatgagccagatatgacctacgttgaaagcgctgctcgctccattgcgccagtgctgaaaaaaggcgcgctggtgatccttgaatccaccagcccggtggggagtaccgagaagatggcagaatggttagcagagatgcgtccggatctcactttcccgcagcaggtgggcgagcaggcggacgtcaacattgcttactgcccggaacgcgtgttaccaggacaggtaatggtcgagctgattaaaaacgatcgcgtgattggtggtatgacgccggtttgtagcgcccgcgccagcgaactgtacaaaattttcctcgaaggtgagtgtgtcgtcactaacagccggacggcggaaatgtgtaagctcaccgaaaacagcttccgcgatgtgaatatcgcttttgctaatgaattgagcctgatttgtgccgatcaggggattaacgtctgggaactgattcgcctggcgaatcgtcaccctcgcgttaatattcttcagcctggccctggcgtgggcggtcactgcattgctgttgatccgtggtttatcgtggcacagaacccccagcaggcgcggcttatccgtaccgcgcgcgaagtgaacgatcacaaaccgttctgggttatcgatcaggtgaaagcggcggtggctgattgcctggcggctaccgataaacgcgccagtgaactgaaaatcgcctgctttggtctggcgtttaaaccgaatattgatgacctgcgcgaaagcccggcgatggaaatcgctgaactgatcgcccagtggcatagcggcgaaactctggttgttgagcctaacatccaccagttgccgaaaaaactgaccgggctttgtactctggcgcagcttgacgaggcgctggcaacggcagacgtgctggtgatgctggtcgatcatagtcagttcaaagttatcaatggcgacaatgtccatcagcagtatgtcgtcgatgccaaaggagtctggcgctgatgagaaaaattctgataacaggtggtgccgggtttattggcagcgcgctggtgcgttatatcatcaacgaaacgagcgacgcggtggtagtggtcgataagctgacctacgccggaaacctgatgagcctggcaccggtcgcgcaaagcgagcgctttgcctttgagaaagttgatatctgcgatcgggcagaactggcacgcgtattcactgagcatcagccagactgtgtcatgcatctggcagccgaaagccatgttgaccgttctattgacggcccggcagcgtttattgaaaccaacattgtcgggacttatacattgcttgaagcggcgcgggcttactggaatgcgctgacggaagataaaaaaagtgcgttccgttttcatcatatctccactgacgaagtatatggtgacctgcacagcacggatgatttcttcaccgaaaccacgccgtatgcgccgagcagcccttattccgcgagtaaagccagcagcgaccatctggtgcgcgcctggctgcggacctatggtctgccgacgcttatcaccaactgcagcaataactacggcccttaccactttccggaaaaactgatcccgctgatgatcctcaacgcgctggcgggtaaaagcctgccggtatatggcaacgggcagcaaatccgtgactggctgtatgtggaagatcacgcccgcgcgctgtattgcgtggcgaccaccgggaaagtcggtgaaacctataatattggtggtcacaacgagcgtaagaatctcgatgttgtggaaaccatttgcgagctgctggaagaactggctccgaacaagccgcacggcgtggcgcactatcgtgacctgatcacctttgtcgctgaccgtccggggcatgatctgcgttatgccattgatgctagcaaaattgcccgtgaacttggctggctgccgcaggaaacctttgaaagtggaatgcgtaaaacggttcagtggtatctggctaatgaaagctggtggaagcaggtgcaggacggcagctatcagggcgagcgtttaggtctgaaaggctaattttcagcggaggcaaacatgaaaggtattatcctggcgggcggttccggcacccgattgcatccgattacgcgcggcgtaagcaagcaactgttgccgatttacgataagccaatgatttactatccgctgagcgtgctgatgctggccggtatccgcgaaattctcatcatcactacgccggaagataaaggttatttccagcgcctgctgggcgatggtagtgagttcggtatccagctggaatatgccgaacagcccagcccggacggtctggcgcaggcctttatcatcggtgaaaccttccttaatggtgaaccttcttgtctggtgctgggcgataacatcttcttcggtcagggcttcagtccgaagctgcgtcatgttgcggcgcgcaccgaaggggcgacggtttttggctatcaggtgatggacccggaacgctttggcgtggtggagtttgacgacaatttccgcgctatcagcctggaagaaaagccaaaacagccgaagagtaactgggcggtgaccgggctttatttctacgacagtaaagtcgtggagtacgcaaagcaggtgaagccgagcgagcgtggtgaactggagattacctccatcaaccagatgtacctcgaggcgggcaacctgaccgttgaactgctcgggcgcggatttgcctggctggataccggcactcacgacagcctgattgaagccagcacctttgtacagacggtggaaaaacgccagggctttaagattgcctgcctggaagagattgcctggcgtaacggctggctcgatgacgagggtgtgaagcgtgctgccagtagtttagcgaaaactggctacggccaatatctgctggagttacttcgtgcccgtccgcgccagtattgagccactaacctgggaaaacgccttctttggtgttaacagcgccatcgtgcgcattacgtctgaagcaccgctcctgacgccagacgcgttagcgccgtggtcacgggtgcaggccaaaattgcggcaagtaatacgggtgaactggatgccctgcaacagctgggattctccctggtagaaggtgaagttgatttggcgctacccgtgaacaatgccagtgatagcggtgctgtagtggcacaagagaccgatattcccgcattacgtcagttagccagcgccgcatttgcgcaaagccgttttcgtgcgccgtggtatgcgcctgacgccagcagtcgcttttatgcacagtggattgaaaatgccgtgcgcggcacctttgatcatcaatgtctgattttacgtgcggcgtccggcgatattcgcggctatgtctctttacgggaactcaatgcgacagatgcgcgaattggcctgctggctggacgcggtgcaggtgctgagctgatgcaaacggcgctaaactgggcgtatgctcgcggtaaaacaactttgcgggtggcgacccaaatgggcaacaccgccgcgcttaaacgatacatacaaagtggtgcgaatgtagaaagcaccgcgtactggttatacaggtgatcacatgattccatttaacgcaccgccggtggtgggaaccgaactcgactatatgcagagcgcaatgggtagcggcaaactgtgtggcgatggcggttttacccgtcgctgccagcagtggctggagcaacgttttggcagcgccaaagtgttactgacgccgtcctgcaccgctagcctggagatggcggcgctgctgctcgatatccagcctggcgatgaagtgatcatgccgagctacacctttgtctccaccgccaatgcctttgtgctgcgtggcgcaaaaatcgtttttgtggatgttcgcccggacaccatgaacatcgacgaaacgctgattgaagcggcgatcaccgacaaaacgcgcgttatcgtgccggtccattacgcgggtgtggcctgcgaaatggacaccattatggcgttggcgaaaaagcataatttgtttgtggtagaagatgccgctcagggcgtgatgtccacttacaaagggcgtgcactgggaaccattggtcatattggctgctttagcttccatgaaaccaaaaactacacggcgggcggtgaaggcggcgcgacgctgattaacgataaagcgttaatcgaacgagccgagatcatccgtgaaaagggcactaaccgcagccagttcttccgtggtcaggtcgataaatatacctggcgcgatattggctccagctatttgatgtccgatctgcaagctgcatacctgtgggcgcaactggaagcagcggatcgtatcaaccagcaacgtctggcgctgtggcaaaactactacgatgcgttagcgcctctggcgaaagccgggcgtatcgagctgccgagcattcccgatggctgcgtgcagaacgcgcatatgttctacattaaactgcgggatattgatgaccggagcgcgttgattaactttctgaaagaagcggaaatcatggcggtgtttcattacattccgctgcacggttgccctgcgggggaacactttggtgagttccacggtgaagatcgctacaccaccaaagagagcgagcgcctgctgcgcctgccgctgttctacaacctgagccccgtcaatcagcgtacggtaattgcgactttgttgaactacttttcctgatatgagcttggcaaaagcgtccttgtggacggcggccagtacactggtcaagattggtgccgggttactggtcggtaagttgctggcggtgagttttggtccggcggggcttgggctggcggcaaatttccgccagttgattaccgtgctcggcgtgcttgccggggctggcatctttaacggtgtaaccaaatacgttgcccagtaccatgataatccgcaacagctgcgccgcgtggtcggcactagtagtgcgatggtacttggtttctctacgctgatggcgctggtttttgtgctggcagctgcgccaatcagccagggattgtttggtaataccgactatcaggggctggtgcgtttagtggcgctggtgcaaatggggatcgcctggggcaacctgttactggcgctgatgaaaggctttcgcgatgccgcaggtaatgcgttaagcctgattgtcggcagcttgattggcgttctcgcgtactacgtcagttaccgtttgggcggttatgaaggggcgttgctgggtctggcgctgattcccgcgctggtggtaattcctgccgccatcatgttgatcaaacgtggtgtcatcccgttaagctatctgaaacccagctgggataacggtctggcagggcagttgagcaaatttacgctcatggcgttgattacgagcgtgaccttgcctgttgcttacatcatgatgcgtaaactgctggcggcgcagtatagctgggatgaggtggggatctggcaaggggtgagcagtatttccgatgcctacctgcaatttattacggcaagcttcagcgtatatttgctgcccacgttgagccggctaacggaaaagcgcgatatcacccgggaagtggttaaaagcctgaaattcgtcttaccggcagtggcggcggcgagttttaccgtctggctgctgcgtgattttgctatctggctgctgttgagcaataaatttaccgctatgcgcgatctctttgcctggcagttagtgggtgatgtgttaaaagtgggcgcttatgtctttggttatctggtgatcgccaaagcgagtctgcggttttatattctggcggaagtcagccagttcactttattgatggtatttgcccactggctaatccctgcgcatggtgcactgggcgcggcgcaggcatatatggcaacttatatcgtctatttttctctttgttgtggcgtgtttttactctggcgtaggcgggcatgactgtactgattcacgtactgggaagcgatatccctcaccataaccgaaccgttttgcggtttttcaatgacgcgctggccgcgacgagcgagcacgcgcgcgagtttatggttgttggcaaggacgacggcttaagtgatagctgtccggcgctttctgtgcaatttttccctgggaaaaaaagcctggcggaagcggtcatcgcgaaagcaaaagctaaccgtcagcagcgttttttcttccacggtcagttcaatcccacactgtggctggctctgctgagtggtggcattaagcccagccagtttttctggcatatctggggggcagacctgtatgagctttccagtggcttgagatataagcttttttacccactacgtcgcctggcgcaaaagcgagtcggctgtgtatttgccacccgcggcgatttgagcttttttgccaaaacgcacccaaaggtgcggggcgaactgctgttcttcccgacgcggatggaccctagcctcaatacgatggcgaacgatcggcaacgtgaagggaaaatgaccattctggtggggaactccggcgaccgcagcaatgagcatattgctgccttgcgcgccgttcatcagcaatttggcgatacggtaaaagtggtggtgccgatgggatatccgcctaataacgaagcgtacattgaggaagttcgtcaggcggggctggagttattcagcgaagaaaatctacaaattctgagcgaaaaactggaatttgacgcctatctggcgctacttcgtcagtgcgatcttggttactttatttttgcccgccagcagggcattggtacgctgtgcttactgattcaggcgggcattccttgtgtgcttaaccgggaaaatccgttctggcaggatatgacggaacaacatttgccggtgctgtttactaccgacgatctcaacgaggatattgtgcgtgaagcgcagcgccagttggcgagcgtggataaaaacaccattgccttctttagccctaactatctacaaggctggcagcgggcgttggcgattgccgccagggaggtcgcatgagtctgctgcaattcagtggcctgtttgttgtctggctgctctgcacgctgtttattgccacgctgacctggtttgagtttcgccgtgtgcgctttaacttcaatgtcttctttagtttgctgtttttgctcacctttttcttcggcttcccgctgaccagcgtgctggtatttcgctttgatgttggtgtcgcgccgccagaaatcttgttgcaggcgttgctttctgcgggctgcttctacgcggtttactatgtcacctacaaaacccgcctacgcaaacgcgttgctgatgtaccgcgccgtccgctgtttaccatgaaccgcgtggagaccaatcttacgtgggtgatcctgatgggtatcgcgctggtaagcgtcggcatcttcttcatgcacaacggctttttgctgttccggcttaactcctacagtcagatcttttccagtgaagtctccggcgtggcgttaaaacgcttcttttactttttcatcccggcgatgctggtggtctactttctgcgccaggacagcaaagcgtggctgtttttcctcgtcagcacggtcgcctttggcttgctgacttatatgattgtcggcggcactcgcgccaatatcatcatcgcattcgctatcttcctgtttattggcattattcgcggctggattagcttgtggatgctggcggcggcgggcgtgctggggattgttggcatgttctggctggcactaaaacgctatggaatgaatgtgagcggcgatgaagcgttctatacgtttctctatctcactcgcgacaccttcagcccgtgggagaatctggcgttgctgttgcagaactacgacaacatcgacttccagggcctggctccaattgtccgcgatttctatgtctttatcccttcctggctgtggccgggtcgcccgagtatggtgctgaacagtgccaactactttacctgggaagtgctgaataaccactccggactggcgatcagccctacgcttataggcagtctggtggtgatgggcggcgcgttgttcatcccgctcggggcgatcgtggttggtctgatcatcaaatggttcgactggctgtatgagctgggcaaccgcgagcctaatcgctataaagctgcgatattgcacagtttctgctttggggcgatcttcaatatgatcgtgctggcgcgtgaagggctggatagctttgtcagtcgcgtggtcttttttatcgtggtcttcggcgcatgtctgatgatcgcaaaactgttgtactggctttttgaaagcgccggactcattcataaacgtacaaaaagtagcctccggacgcaggttgaaggataacaatgaataacaacaccacggcaccaacctatacgctgcgtggcttacagttgattggttggcgtgatatgcagcacgccctcgattatctgtttgctgacgggcagcttaagcagggaacgctggttgccattaatgctgaaaaaatgctgactattgaagataacgccgaggtcagggagttaattaacgctgccgaatttaaatatgcggatggcatcagcgttgtacgtagtgtacgtaaaaagtacccgcaggcgcaggtttcccgcgttgccggtgccgatctctgggaagagctgatggcgcgcgcaggcaaagaagggacgccggtatttcttgtgggcggtaaacctgaagtgctggcgcaaactgaagctaaactgcgcaaccagtggaatgtgaatatcgttggcagtcaggatggttattttaaacccgagcagcgtcaggcgctgtttgaacgcattcatgccagcggtgcgcaaatcgtcaccgttgcgatgggaagcccaaagcaggagatcatcatgcgcgactgccgtctggtacatccagatgcgctgtatatgggcgttggcgggacttacgatgttttcaccggtcacgtaaaacgcgcaccgaaaatctggcaaacgctggggctggagtggctctaccgcctgcttagccagccgagccgcattaagcgtcagcttcgtttgctgcgttatttacgctggcactacaccggcaacctatgattttcctctctttgtaaagcgacggagtggtcactccgtcgcctgtctgcttttttattacacaaagcattcaaatttttaatgctttatttgccatttctcctgaattacgaaaacatttgcaacactcgatgtacccataacgataaccggtaacaccggaaagcatgcaaacacaacacgaggatttatggcagataacaaaccagagctacagcgtgggctggaagctcgacatatcgaactcatcgccctggggggcaccattggcgtcggcctgtttatgggggccgccagtaccctgaaatgggccgggccatccgtattgttggcctatatcatcgccgggctgttcgtctttttcatcatgcgtagtatgggcgaaatgttgttcctcgaaccggttaccggtagcttcgccgtttatgcgcatcgttatatgagcccgttctttggctatctcaccgcctggtcttactggtttatgtggatggcggtggggatctctgaaatcaccgccattggcgtttatgtccagttctggttcccggagatggcgcagtggatacccgcattgatcgcagtggcgctggtggcgttggcgaatctggcggcggtgcggttgtacggcgaaatcgagttctggttcgcgatgatcaaagtcaccacgattatcgtgatgattgtcattggcctgggcgtgattttctttggctttggcaatggcgggcagagcattggttttagcaatctcacagagcatggcggtttctttgcgggtggctggaaagggttcctgaccgctctgtgtattgtggtggcgtcctaccagggcgtggagctgattggcattactgccggtgaagcgaagaatccgcaggtgacgctgcgcagtgccgtaggcaaggtgctgtggcggatcctgattttctacgtaggcgcgattttcgttatcgtcaccatcttcccgtggaatgaaataggcagcaacggcagcccgttcgtactgacttttgccaaaatcggtattaccgcagcggcgggcattatcaactttgtggtgctgacggctgcgctctctggctgtaacagcggcatgtacagttgcggacgtatgctctacgcactggcgaaaaaccgtcagttaccggcggcaatggcgaaagtttcccgtcacggcgtaccggttgcgggtgtggcagtatctattgctattctgctaattggcagttgcctgaactacatcattcccaatccgcagcgtgtgtttgtctacgtctacagtgccagcgtgcttccggggatggtgccatggtttgtgatattgataagccagctgcgttttcggcgtgcacataaagcggcgattgccagccatccgttccgcagtatcctgttcccgtgggccaattacgtaacaatggcattcctgatttgcgttttgatcggcatgtactttaatgaagatacgcgtatgagcctgtttgttggcatcatctttatgctggcggtgacggcgatttataaagtttttggccttaatcgccacgggaaagcgcataaactggaggaataagcagcaaaacgcacaaaccgtaaccaaacgcgcaatttatttaaaaagggactagacagaggggtgggaagtccgtattatccacccccgcaacggcgctaagcgcccgtagctcagctggatagagcgctgccctccggaggcagaggtctcaggttcgaatcctgtcgggcgcgccatttagtcccggcgcttgagctgcggtggtagtaataccgcgtaacaagatttgtagtggtggctatagctcagttggtagagccctggattgtgattccagttgtcgtgggttcgaatcccattagccaccccattattagaagttgtgacaatgcgaaggtggcggaattggtagacgcgctagcttcaggtgttagtgtccttacggacgtgggggttcaagtcccccccctcgcaccacgactttaaagaattgaactaaaaattcaaaaagcagtatttcggcgagtagcgcagcttggtagcgcaactggtttgggaccagtgggtcggaggttcgaatcctctctcgccgaccaattttgaaccccgcttcggcggggttttttgttttctgtgcatttcgtcaccctcccttcgcaataaacgcccgtaataactcattgccccacggtatgatttcgcccttaacgtattgaaggatgacttcaggcaaggagcgaccatgctgcaacaggttccaacgcgtgcttttcatgtgatggcgaaaccgagcggttccgattgtaatctgaactgtgactactgtttttatctcgaaaaacaatccctttaccgcgaaaagccagtcacgcatatggacgatgacacgctggaagcgtatgtccgtcactatatcgctgccagcgaaccgcaaaacgaagtggcttttacctggcagggcggcgaaccaacgctactcgggctggcgttttaccgccgtgccgtagcgctacaggcgaaatatggtgctggcaggaagataagtaacagcttccagactaacggcgtgctgctggatgacgaatggtgcgcgtttctcgcggagcatcattttcttgttggtttaagcctggatggcccgcctgagatccacaatcaatatcgcgtgactaaaggtggcagacccacgcataagctggtgatgcgtgccctgacgctcctgcaaaaacatcatgtcgactataacgtgctggtctgcgttaatcgcaccagcgcgcagcaaccgttgcaggtatatgattttttgtgcgatgcgggagtcgaattcatccagtttattccggtggtcgagcgcctggctgatgaaacaactgcccgcgatggacttaagttacatgcgcctggtgatattcagggtgagctaacggaatggagcgtgcgccccgaggagttcggtgagtttctggtggcgatattcgaccactggatcaaacgcgacgtcggcaagattttcgtgatgaatatcgaatgggcgtttgccaattttgtcggtgcgccgggtgcggtttgccatcatcagccaacctgtgggcgcagcgtgattgttgagcacaacggcgacgtttacgcctgtgatcactatgtttatccgcaatatcggctggggaatatgcaccagcaaacaattgcagaaatgatcgattccccgcaacagcaggcgtttggtgaagataaatttaagcagttaccggcgcagtgtcgcagttgtaacgtgttaaaagcgtgctggggaggctgcccgaaacaccgcttcatgctcgatgccagcggcaaaccgggactgaattatttgtgtgccgggtatcagcgttatttccgccatctaccgccatatcttaaagcaatggctgatttgctggcgcacggtcgcccggccagcgacattatgcatgcgcatttgctggtggtgagtaagtaaaaatcggcggccgcctgcggttgattgccggatgcggcgtaaacgccttatccggcctacatgatcgtgcaaattcaataaattgcagcgttctgtaggctggataagatgcgtcagcatcgcatccggcaaaggcagatctcagcgatagcgccggcttagtcagatttaatctgcgcgcgtggtggatattttttcaggatctccatatacgcgtgcatttcggtctgtagcggtacacccatcggaatatggcgcacgccgatggagtcgctttcctgcggatcggtgtagaggttaaacacgctgcttcccgccgtttgcattactgtgccggtgaatccaccctgatatccgctctgggtataagcgtaaggttgctgaatcaggacgtgatacttgaactcatccatacgcacagcagcgagtttaccgttgaggaagtagtgctcggccttacggttagactgaccatttgttcccaggaagaaggatgtctggtccacaccatcgataaaggtggttttcggcactaaattcgccactttcgctccaggatgccctgccagatccagcgcggtagggaagagatctgccagatcgacaataccgtcagatttacgcggttggatcatccctttccagtaaacgaaagtcggtacgcgaacgccgccttcccaggtgctacctttcgcaccacggaacggggtgcgtccgtgcggcggtacttcggcttccggtccgttatcggaggtaaagacgatcagcgtgttatcaagctgaccgtttttctccagtgttttatacagattagcgaacacatcgttcatctccaccatgcagtcgccatagctggtgcgtgccggagagctacccgcatatttcgcatttgggtagttatcgaagtggcagccacgagtgccgtagtagaggaagaatggtttatcgctcttcgccatcttgtcgaggaacttaacgccatagtccatccagcgttgatccagatcttccatatatttcggcgtaatgtcggcaatggcctgttgttcgccgccgcgcaccgcatgaacgtcatctttgctgaacggtaattgcttgatgtattcagaacggtccggactcagggccacttccggattgacgtgaacgtcgcgccattcggtgtacatatcagacacgctgttaaagccacggaaatcatcaaagccaacgttctgcggctggctctctttgttttcccccatatgccattttccgatggcctgagtgacgtagccctgatcgtgcagcaactgcggcagcgtggttaacccttgcagcccgcccggttgcccgtacattggcggcatcagaatgccgtggtggatggagtattgtccggtgagaatggtggcgcgggttggggaagagcttggttgagaatacgcgctagttaaaatcagcccctggctggcaacggcgtcgatatctggtgtagggttacccaccgccacgccgccaccgttaaaaccgacgtccatccagcccacatcgtccagcaagaaaacaaccacattcggtttcttaccggtttttttctcaagttctgccagcttctgctgggtttctttatcctgcgccggatgctgcattactggcatcatattgtcggcaatagtggtcgccggtttaaccagatactggtttgggtgatcgtatccggcaaagcctttgcgtgcggtggcagtactcggggtatctgctgcgctggccatgagaggaagagcggcggcgacagcaacaacaagacgtttgggactaaagctaaattccatgcaaaatgctccggtttcatgtcatcaaaatgatgacgtaattaagcattgataattgagatccctctccctgacaggatgattacataaataatagtgacaaaaataaattatttatttatccagaaaatgaattggaaaatcaggagagcgttttcaatcctacctctggcgcagttgatatgtaaggcaggtttattatatcgcgttgattattgatgctgtttttagttttaacggcaattaatatatgtgttattaattgaatgaattttatcattcataataagtatgtgtaggatcaagctcaggttaaatattcactcaggaagttattactcaggaagcaaagaggattacagaattatctcataacaagtgttaagggatgttatttcccgattctctgtggcataataaacgagtagatgctcattccatctcttatgttcgccttagtgcctcataaactccggaatgacgcagagccgtttacggtgcttatcgtccactgacagatgtcgcttatgcctcatcagacaccatggacacaacgttgagtgaagcacccacttgttgtcatacagacctgttttaacgcctgctccgtaataagagcaggcgtttttttatgtatcaggaaggccccggaggtgcttgcctccgggtgagaaggaattactgtggcgggttattctgcaacgttaacatcaaaccgtcgcgacgcatagctgcagcttcttccggcttgtgcagtctgtccagcgcgtcggcaagccatgcgtaatcgtaggcgtccggacgttgtttcagcgctgcgcggaaggcgaggcttgcttcctgccattctccgtgcttcatcagactctggcccagtgtgctccacaacagcgggcgatcgccgacgtttttgatttgctggcgcagcactttttccagctgttccggattgtttgttttcagtcgaggaatcggcagcagtaggcgatcgtcgtactggcgtttcaggccatcgatgataatttgctgggcagtatcatgatcgtcacattcaataagatgttccgccattgccacctgcaacgctacctgatgacgcgttttccggctttggtttttccaccagttacgcaaaccttcgctaccgttatcggcacgcgcctgatccatcaggccaatccatgcctgttgttccagcattgcacgatgttcttcatcaccaacatgggctttcgccatacttgggataatatccagcaggctactccatgcacctgtgcggatatacgcctgttccgccagacgtaatacttccggatggcgtggcgtaacttccagcagcttatccacgccgtggcgtgcagcatggttttcattacgggccagttgcagacgtacgcgggtgatttctaccggaatggtgtcgttgccggccagctccgctgcgcgttccagatgttggttggcgcgtgcttcatcaccacgttgttgcgcggcttcggcagccagtagatagttcaccaccggttgttccgcgtgatcggcatttttcgccatcagcttttcaacttgctgataatcgccttccgccagtttcagcagcgcctgttcggtctgcttacgtgcacggcgacgcttacgtccgacaaaccacccacgggtgtgcgcgccagtgcggaagatccgccgcagtagccactcaatggcaaacagcactaccatcgccagaatcaatatgatcgccaggcccgtgacgctggtttcgatattgtagttgtcggtctggatcagcacataaccctgatggccggcaatcatcgggccaaccacgatccccgcaatcagcaacacaaagagcaataacacttttagcatggttattctccttgcggcgcggctgccggagtatcagcttgcggtgcaggtgcaggtttagcttccgttgtccccgctgccggttgtgccagcaggttacgcacgcgagtctgcatcagtttttccagcatcgcctggctttgcagggtttccggaagatccatgctgatattttgctggcttaactggtccacctcgtcgaggaacgctttggtggtggcatcatcagtatcgtagtaagcacgtacccaggtggagacgttctccagcgcctggcgataagtctcttcctggtgacgcggtacagcttgtgctgcgaccagcaggcgagagcgaatattttcgcgcagatagatatcctgatttggcgctaacagcggtacggcggtgtcatcacgacggcgaatcgtaatgaagttgtccataaagttctgccagcttttttgcagattgatacgccattcgctgatggaactggaaagctcttcaccgtcactatccatcgggctaccatcgctgtcattatcggccagacgcaggttatctacctgattactaagctgattaagcttaaggatgatgccgtcataatccacctggcttactgcagaaaggctggcgatatcatcggtaattgcccgacgaacggtaatcagactcgggtcattcatatccgccaggctggcgtctgcacttttcagcaacgctgcagcggtcgtgacgtcctgatcgctccacagcttccgtccggcgagtttcaccagaaaatcggcctgagccagcagccaggttttagcatcgctgccggaaatggtggcgaccttttgttggacttcatccaactgttttgccagcgtttcttgctgacgattcgcctgcttaagttgtgcagcttgttgcttaataatgccttccagctcggctttttggctctcctgggctttttgcaatgccgtcagttggttagccagggcatcgctggtggcggtctgattgacggcctgttgtttaccccagccatacaaaccgatgcccgccgccagagcaatagcgatagccaccgcgctgagaatcaatgcggtattgttcttactctttttttctgttgcgacaggttgactcgtggtgtccacggcctccctggtctcttcaaccacggcggaggttttttcttgttccgtcattatggcttcctgttatgagagttattgtaatgcccgtaaaagcgcatcgttgtcagcgttatcggcgaccttaatgtcttgccagcccagttcccgggcgagtttcgccaaacgctcactgacgaccaatagtcgacagtgtagtaaccagtgctcacgataccattgtgggatcaggctccagagttgctgcaacatttcaccgctggtaacaacgaccatcgtcacctcgcgggcttgccagcgcatcgcttcttctgcaccatcgtaatggattgcgcatcgttgataacattcacaaaaagtgacctcagcaccgcgcgccgtcagggtatccccaattagctcacgaccaccattgccacgtaatatcagcgcacgtttgcccgcaatattttgtaattcaggtaattgtagcaagacttcgctgatttcccgatcctgcgggtagagaatcttctgtccacttacggtatgtagtgccagtgcggtggtgcgtccaatggcgaaataatcaggtagtcggggccatttacgatcttgctgatgcagctgactttgggcaaaagcaaccgcgtgttggctgagggcaaacaacagatcgctctcccccagcgctgccagttgatcagcaagttgcggtaattgttgacccggagaaaactcaatcagcggaaaatgccaggccacctgccccagtgtgcgcagacggctcactaactcttctccagcgggagacgggcgggtgacaaggatactcatgccggggcgtctccgttatagacttcagcgaggatctcgcgcgcgccgttattcagtagctcttctgccaggctaatccccatttgttcggcatcttgcggcgcaccgcggcgttcaccgcgaataatctggctaccgtccggcgcgccgaccagcgcacgcagccagatttcgccatcaataagctcggcgtagctaccaattggcacctgacatccgccttcgagacgggtattcatggcgcgttctgcggtaacgcgcagtgcagtttcgtggtgattcagcgcggcaagcagctcgcgagtgcgactatcatcaaggcggcattcaatacccaccgcaccttgtcctaccgccggaagagaaatctcgggtggcaacgcggcgcgaatacgactctccagacctaaacgttttagtccggctacggcaagaatgatggcatcgtattcgccgttatccagtttgctcaggcgagtgccgacgttgccgcgcagggagcggataatcagatccggacggcgttcagccagttggcactggcgacgtaaactggacgtcccgacgatactgcctgccggtaacgcatccagactgtcatagttattggacacaaaggcatcgcgaggatcttcacgctcacaaatagtgaccagtcccagaccttgcgggaattcaaccggcacatctttcatactgtgtacggcgatatcggcgcgattttcgaggagcgcgacttccagctcttttacaaataagccttttccgcctactttcgccagcggcgtatcaagaatcacatcgccgcgcgtcaccatcggtaccagttcaacgaccaggcccggatggctcgccatcaacttgtctttgacatagtgtgcctgccagagtgcaagtgggctttggcgtgtggcaattcttaaaacattgtctaacatgcttgttaccgtcattatcatccgtggtccatcctaacatccttgccagagtgatgtcagtgttgtggtgaaacgtagacgcctgcgcaaaccgtaaaatgaggtctggcagtggatcctgacaggcgtttcacgccgttgtaataaggaatttacagagaataaacggtgctacacttgtatgtagcgcatctttctttacggtcaatcagcaaggtgttaaattgatcacgttttagaccattttttcgtcgtgaaactaaaaaaaccaggcgcgaaaagtggtaacggttacctttgacatacgaaatatcccgaatgccgcgtgttaccgttgatgttggcggaatcacagtcatgacgggtagcaaatcaggcgatacgtcttgtacctctatattgagactctgaaacagagactggatgccataaatcaattgcgtgtggatcgcgcgcttgctgctatggggcctgcattccaacaggtctacagtctactgccgacattgttgcactatcaccatccgctaatgccgggttaccttgatggtaacgttcccaaaggcatttgcctttacacgcctgatgaaactcaacgccactacctgaacgagcttgaactgtatcgtggaatgagtgtacaggatccgccgaaaggtgagcttccaattactggtgtatacaccatgggcagcaccagctccgtagggcaaagttgttcctctgacctggatatctgggtctgtcatcaatcctggctcgatagcgaagagcgccaattgctacaacgtaaatgtagcctgctggaaaactgggccgccagcctgggtgtggaagtcagcttcttcctgattgatgaaaaccgcttccgtcataatgaaagcggcagcctggggggcgaagattgtggctccacccagcatatactgctgcttgacgaattttatcgtaccgccgtgcgtctcgccggtaagcgtattctgtggaatatggtgccgtgcgacgaagaagagcattacgacgactatgtgatgacgctttacgcgcagggcgtgctgacgccaaatgaatggctggatctcggtggcttaagcagcctttctgctgaagagtactttggtgccagcctttggcagctctacaagagtatcgattccccatacaaagcggtactgaaaacactgctgctggaagcctattcctgggaatacccgaacccacgtctgctggcgaaagatatcaaacagcgtttgcacgacggcgagattgtaagctttggtctcgatccatactgcatgatgctggagcgtgttactgaatacctgacggcgattgaagattttacccgtctggatttagtacgtcgctgcttctatttaaaagtgtgcgaaaagctcagccgtgaacgcgcctgcgtaggctggcgtcgcgcagtgttgagccagttagtgagcgagtggggttgggacgaagctcgtctggcaatgctcgataaccgcgctaactggaagattgatcaggtgcgtgaggcgcacaacgagttgctcgacgcgatgatgcagagctaccgtaatctgatccgctttgcgcgtcgcaataaccttagcgtctccgccagtccgcaggatatcggcgtgctgacgcgtaagctgtatgccgcgtttgaagcattaccaggtaaagtgacgctggtaaacccgcagattagtcccgatctcagcgaaccgaatctgacctttatttatgtgccgccgggccgggctaaccgtagtggttggtatctgtataaccgcgcgccaaatattgagagcatcatcagccatcagccgctggaatataaccgttacctgaataaactggtggcgtgggcatggtttaacggcctgctgaccagccgcacccgtttgtatattaaaggtaacggcattgtcgatttgcctaagttgcaggagatggtcgccgacgtgagccaccatttcccgctgcgcttacctgcaccgacaccgaaggcgctctacagcccgtgtgagatccgccatctggcgattatcgttaacctggaatatgacccgacagcggcgttccgcaatcaggtggtgcatttcgatttccgtaagctggatgtcttcagctttggcgagaatcaaaattgcctggtaggtagcgttgacctgctgtaccgcaacagctggaacgaagtgcgtacgctgcacttcaacggcgagcaaagcatgatcgaagccctgaaaactattctcggcaaaatgcatcaggacgccgcaccgccagatagcgtggaagtcttctgttatagccagcatctgcgcggcttaattcgtactcgcgtgcagcaactggtttctgagtgtattgaattgcgtctttccagcacccgccaggaaaccgggcgtttcaaggcgctgcgcgtttctggtcaaacctgggggttgttcttcgaacgcctgaatgtaagcgtacagaaactggaaaacgccatcgagttttatggcgcgattagccataacaaactgcacggcctgagtgtgcaggttgaaaccaatcacgtcaaattaccggcggtggtggacggctttgccagcgaagggatcatccagttctttttcgaagaaacgcaagacgagaatggctttaatatctacattctcgacgaaagcaaccgggttgaggtatatcaccactgcgaaggcagcaaagaggagctggtacgtgacgtcagtcgcttctacagcagtagccatgaccgttttacctacggcagtagcttcatcaacttcaacctgccgcagttctatcagattgtgaaggttgatggtcgtgaacaggtgattccgttccgcacaaaatctatcggtaacatgccgcctgccaatcaggatcacgatacgccgctattacagcaatattttagctgatgaacgtgccggaaagcgaggcttatccggcatgcaatcttagcggaaactgactgtttcacccgcctgctgcgtcgccgcctgttccagcaaatcccagaaggtttcgccgctgcgatcacaaatccactcatcgcctttcaggtcaaaatggtagccgccctgtttggttgccagccatacctggtgcagcggctcctggcggttgataatgattttgctgccattctcaaaggtaatggtcagtacgccgccgttgatttcgcagtcgatatcgctgtcgccatcccagtcgtccaggcgttcttcaatggtcagccagagttgatcagccaggcgatgaaattcactgtcgttcattgttgtatcctgtttttaagtgatggcggcagtatagcggcatggggtcagggcttcaaagtttgcacctctgcggctgcgttccggcacgatagttccgtcaccggaataatgatgtctctgtgtagcgaaagatttgtctctagtttagggcgcagttacaccacgtctttccctgtttctggtaaacattatgatcaggtttaccgagcgagcatcctcacgctgacggaactaaaaaagacaacaaacaaaccacattgcgatagtgcataaagccatcctggcgcgaggtgccgatcacgaaactaccagcaaaacataaatccccacgagtaagcgttatactcgcagcatttcctcacttttcagacttcataaagagtcgctaaacgcttgcttttacgtcttctcctgcgatgatagaaagcagaaagcgatgaactttacaggcaatccataatgaaaaacgtgtttaaggcactcactgtattacttactctcttcagcctgacgggctgcggtctgaaaggtccgctctatttcccgcctgcagataaaaacgcaccgccgccgaccaaaccggtagagacgcaaacgcaatccacggtgccggataaaaacgatcgcgccactggcgatggtccatcccaggtgaattactaaaagtcagtttctgtacccgcgtgattggagtaaatgatgcagttcagcaaaatgcatggccttggcaacgattttatggtcgtcgacgcggtaacgcagaatgtcttttttagtccggagctgattcgtcgcctggctgatcggcacctgggggtagggtttgaccaactgctggtggttgagccgccgtatgatcctgaactggattttcactatcgcattttcaatgctgatggcagtgaagtggcgcagtgcggcaacggtgcgcgctgctttgcccgttttgtgcgtctgaaaggactgaccaataagcgtgatatccgcgtcagcaccgccaacgggcggatggttctgaccgtcaccgatgatgatctggtccgcgtaaatatgggcgaacccaacttcgaaccttccgccgtgccgtttcgcgctaacaaagcggaaaagacctatattatgcgcgccgccgagcagacaatcttatgcggcgtggtgagcatgggaaatccgcattgcgtgattcaggtcgatgatgtcgataccgcggcggtagaaacgcttggtcctgttctggaaagccacgagcgttttccggagcgcgccaatatcggttttatgcaagtggttaagcgcgagcatattcgtttacgcgtttatgagcgtggggcaggagaaacccaggcctgcggcagcggcgcgtgtgcggcggttgcagtagggattcagcaaggtttgctggccgaagaagtacgcgtggaactccccggcggtcgtcttgatatcgcctggaaaggtccgggtcacccgttatatatgactggcccggcggtacatgtctacgacggatttattcatctatgaagcaaccaggggaagaactgcaggaaacactcacggagcttgatgaccgggcggttgtcgattatctgattaaaaatcctgagttttttatccgtaatgcgcgcgcagtagaagcgatacgtgtgccgcatccggtacgcggcaccgttagcttggtcgagtggcacatggcccgcgcacgtaatcatattcatgttctggaagagaacatggcgctgttgatggaacaggctatcgccaacgaaggcctgttttatcgcctactctacctgcagcgcagtctcaccgccgccagcagtctcgacgatatgctgatgcgctttcaccgctgggcgcgcgatctcggcctggcaggtgcgagtctgcgcctgtttccggatcgctggcgcttaggtgcgccgagcaaccacactcatctggcattaagccgtcagtctttcgaaccgctgcgtattcagcgtttggggcaggaacagcactatcttgggccgcttaacggaccagagctgctggtggtgctaccggaagcgaaagcggtgggaagcgtggcgatgagcatgctgggaagcgatgctgatttgggtgtcgtgctgtttaccagtcgcgatgccagtcactatcaacaagggcaaggaacgcagttacttcatgaaattgcgctgatgttgccggagcttctggagcgttggattgaacgcgtatgaccgatttacacaccgatgtagaacgctacctacgttatctgagcgtggagcgccagcttagcccgataaccctgcttaactaccagcgtcagcttgaggcgatcatcaattttgccagcgaaaacggcctgcaaagctggcagcaatgtgatgtgacgatggtgcgcaattttgctgtacgcagtcgccgtaaagggctgggagcagcaagtctggcgttacggctttctgcgctacgtagcttttttgactggctggtcagccagaacgaactcaaagctaacccggcgaaaggtgttagcgcaccgaaagcgccgcgtcatctgccgaaaaacatcgacgtcgacgatatgaatcggctgctggatattgatatcaatgatcccctcgctgtacgcgaccgtgcaatgctggaagtgatgtacggcgcgggtctgcgtctttctgagctggtggggctggatattaaacacctcgacctggagtctggtgaagtgtgggttatggggaaaggcagcaaagagcgccgcctgccgattggtcgcaacgctgtggcgtggattgagcactggcttgatttgcgcgacctgtttggtagcgaagacgacgcgctttttctgagcaaactgggcaagcgtatctccgcgcgtaatgtgcagaaacgctttgccgaatggggcataaaacaagggctgaataatcacgttcatccgcataaattacgtcacagcttcgccacgcatatgctggagagcagcggcgatcttcgtggtgtgcaggagctgctgggtcatgccaacctctccaccacgcaaatctatactcatcttgattttcaacaccttgccagcgtgtacgatgcggcgcatccacgcgccaaacgggggaaataatgcgtttttaccggcctttggggcgcatcagcgcgctcacctttgacctggatgataccctttacgataaccgtccggtgattttgcgcaccgagcgagaggcgcttacctttgtgcaaaattatcatccggcgctgcgcagcttccagaatgaagatctgcaacgcctgcgccaggcggtacgggaagcggaacccgagatttatcacgacgtgacgcgctggcgttttcgtagcattgaacaagcgatgctcgacgccgggctgagtgccgaagaagccagtgcaggcgcacacgcagcaatgatcaactttgccaaatggcgcagccgaatcgacgtcccgcagcaaactcacgacaccttaaaacagctggcgaagaaatggccgctggtggcgatcaccaacggtaacgcccagccggagctgtttggtttgggggattattttgagtttgtgctgcgcgctggcccgcacgggcgcagtaaaccgttcagcgatatgtactttttggctgcggaaaaactcaacgtgccgatcggcgagatcttacatgttggggacgatctcaccactgacgtgggtggggcaattcgcagcggaatgcaggcttgttggatcagaccggaaaatggcgatctgatgcaaacctgggacagccgtttactgccgcatctggaaatttcccggttggcatctctgaccagcctgatataatcagcaaatctgtatatatacccagctttttggcggagggcgttgcgcttctccgcccaacctatttttacgcggcggtgccaatggacgtttcttacctgctcgacagccttaatgacaaacagcgcgaagcggtggccgcgccacgcagcaaccttctggtgctggcgggcgcgggcagtggtaagacgcgcgtactggtgcatcgtatcgcctggttgatgagcgtggaaaactgcagcccatacagcattatggcggtgacgtttaccaacaaagcggcggcggagatgcgtcatcgtatcgggcaactgatgggcacgagccagggcggtatgtgggtcggcaccttccacgggctggcgcaccgtttgctgcgtgcgcaccatatggacgccaatctgccgcaggatttccagatcctcgacagtgaagaccagctacgcctgcttaagcgtctgatcaaagccatgaacctcgacgagaagcagtggccgccgcggcaggcaatgtggtacatcaacagccagaaagatgaaggcctgcgtccgcatcatattcaaagctacggtaatccggtggagcagacctggcagaaggtgtatcaggcgtatcaggaagcgtgtgaccgcgcgggcctggtggacttcgccgagctgctgctgcgcgctcacgagttgtggcttaacaagccgcatatcctgcaacactaccgcgaacgttttaccaatatcctggtggacgaattccaggataccaacaacattcagtacgcgtggatccgcctgctggcgggcgacaccggcaaagtgatgatcgtcggtgatgacgaccagagtatctacggctggcgcggggcgcaggtggagaatattcagcgtttccttaatgatttccccggtgccgaaactattcgtctggagcaaaactaccgctctaccagcaatattctgagcgccgctaacgccctgattgaaaacaataacgggcgtctgggtaaaaaactgtggaccgatggcgcggacggtgagcctatttccctctattgcgcttttaacgaactcgatgaagcgcgttttgtggttaaccgcatcaaaacctggcaggacaacggcggagcgcttgccgagtgcgccattctctaccgcagcaacgcccagagccgggtgctcgaagaggcgttattgcaggccagtatgccgtaccgtatttacggcgggatgcgcttcttcgaacgccaggaaatcaaagatgcgctcagctatctgcgcctgattgccaaccgcaacgacgacgcggcctttgagcgtgtggtgaatacgccaacgcggggtattggtgaccggacgctggacgtggtacgtcagacaagccgcgatcgccagttaacactctggcaggcatgtcgtgagctgttgcaggaaaaagccctcgccgggcgagctgccagcgccttgcagcgatttatggaattaatcgacgccttagcgcaggaaactgccgatatgccgctgcatgtacagactgaccgggtaattaaagactccggcctgcgtaccatgtatgagcaggagaagggcgaaaaaggtcagacgcgtatcgaaaacttagaggaactggtgacggcaacgcgccagttcagctacaacgaagaagacgaagatttaatgccgctgcaggcgttcctctcccatgcggcactggaagcaggtgaagggcaggcggatacctggcaggatgcggtgcagttgatgacgctacacagcgcgaaaggcctggagttcccgcaggtgtttatcgttggtatggaagagggcatgttcccaagccagatgagcctggatgaaggcgggcgtctggaagaagaacgccgtctggcctacgttggcgtaacccgcgcgatgcagaaactgacgctgacctacgcggaaacccgccgtctgtatggtaaagaggtttaccatcgcccgagccgctttatcggcgagctgccggaagagtgtgtggaagaggtgcgcctgcgcgccacggtaagccgcccggtcagccatcagcggatgggtacgccgatggtcgagaacgacagcggctacaagctcggccagcgcgtacgccacgctaagtttggtgaaggcaccattgtcaatatggaaggcagcggtgagcatagccgtttgcaggtggcatttcagggccagggtattaaatggctggtggcggcatacgcccggctggagagcgtgtaacgttgccggatgcggtgctgcgcaccttatttggcctaaaaaatcattcagattcaataaattgcaacgtcatgtaggccggatagggcgtttacgccgcatccggcatctgcgccatcttcagtatctgacacaaaactatcgttttaacctttccgctcgacggaaatcatggtgacaaaaggatagcgttgccacgggattgccccgcctttcatatacatatgactaatcgtgccatcaagataaagcagctgctcaacgttcagtttcgctttggcataacaggcaaaatcataaaaatttgttgcctgctggctcaacaaaaacacggcgttcccatgtttattaatcccaacaccgttacgaattttgctactggcgacgttgggatgaatacgcggattaattacaccgttttccatcaacattggcccactctgcaccgcaaactgaatctctttactggttttgaaggcatccagacgaacgatgccgactttatctcccgcgacataaaacacgccgccaggacggataaagaaattcccttcaccactagcgagatttaacgccaccttctgctgaccgttttcgatgtacaaaccgagcggcgcatagctttcatcatagatgccgccgttcatcgccatctgcacctgaccctgactattaatatccgccagcagagcatgtaacgttccccacgcttcgccattggctttttgccagtacattttcacccgctctgtttgaggattaacggtatacgcctgtacggtcagcgtcggatcactgagtgcgcaatcatcagcggcaacagcaaacaagggaagtaaggtgagggcgagaaaaatccgtttgagattcaaggtgatcattcctttaccaatgagtagctgatgcgccattataggtcctggatgtgggatttttttatcctgttagcgaccttgacgagtaccaaaaagcgcgaagttcaactattgttctgtggtgttctgttgcgtgttgacggcaaaattttgctggcgtaacatgcgcgcacgatcactctaagaggacattcgccttggacacacccagtagatactggctcactatcctgtcatccaggatcaactcctaaggctatccctttttgctgatagccttagcggttgtcagcgacctcaatttttcccgtcgcgctgagtcaggctgtttaatggtctgaaacccaatttgtttctgtgtgcccaccgaactgtccgatattttaagcattgggagtcccggtcatgctgagcgcatttcaactggaaaataaccgactgacccggctggaagtcgaagagagtcaaccccttgtaaatgcagtatggattgatcttgtcgaaccggacgacgacgagcgactgcgcgtacaatctgaacttggccagagcctggcaacccgcccggaactggaagacatcgaagcaagcgcacgtttctttgaagacgacgacggcctgcatattcactccttcttcttctttgaagatgcggaagatcacgccggtaactccactgtggcatttaccatccgtgatggtcgtctgtttactctgcgtgagcgtgaactgcccgcttttcgtctgtatcgtatgcgtgcccgtagccagagcatggtagacggtaacgcctacgagttgctgctggatctgttcgaaaccaaaatcgaacagttggcagatgaaattgaaaatatctatagcgacctggagcagttgagccgggtgattatggaagggcatcagggcgatgagtacgacgaggcgctctccactctggcggaactggaagatatcggctggaaagttcgcctgtgtctgatggatacccagcgcgcgctcaacttcctggtgcgtaaagcgcgtttaccgggtgggcaactggagcaggcgcgtgaaatcctgcgagatatcgaatccctgctgccgcataacgaatccctgttccagaaggtgaacttcctgatgcaggcggcaatgggttttatcaacatcgagcagaaccgcatcatcaaaatcttcagcgtggtatccgtggtattcctgccgccgacgctcgttgcttccagctatggcatgaactttgagtttatgccagaactgaagtggagcttcggctaccctggcgcgattatctttatgatcctcgcgggcctggcaccgtatctgtactttaagcggaagaactggttgtaaaaaacgagagcggtggcttagtctggctaagccacctgttattcaaaggctccaggtatttaacccttttacctctttctcatagaaccatttgttcgtgttaacagcaacataggctgctacggcaattcccagaatgttaacgccaattagtgcaccaacaaatagagatagaataccaagtaatagaactataattgcttttttccataaccccaggacaaataaatatatccaggaacagaagaaagcaatgaaattcatttgaatagttaagcgttgtcttacttttaatgctttaaatgctgctttatattctggtgttgccccccagaatccaggaaaaccatgttgatcataaaaattaaatcggtatttccatttttcacttaaactaccatcgttcatatattccttactcataaatactccataattattgtttactactatcagtaggtgcaagcattagcatactgaaagtggaaaaataacaaatcaaaaaaatcatgctaccattgccactacaggcaaaatcttcggctatcattgtgatgatagagatgatatatactgctaatgtaccaaaaacataagtttttatatagatgaaaccactatcacggagtcgctggcaattcatgttgatgacgagataatggagtacgatggtagagactataacaagaaagcctgcttctccatcgttaaaaaagataataagaaaggcaaaaatgaaatttattaaaataaaactaaatatataacgacgtctggaaatcttaccgttagatgttgggataaatatacgtaacataaattttacatccttgtatgagtctccggtcagcatggcaatatgcccactctcatgcaagagtcggcatattttttcagaatatatttattttttatttggacgttctacgctgcgtataaatcgcatccatcacaaaaattgccagcgccacccaaataaaggcgaaagtcaccatcttatcggcacccggtttttcaccataaaacgtcacagccagcaggaacatcagcgtcgggccaatgtactggaaaaagcctaacgtactgagacgcaagcgcgtggcagcggcggtaaaacacaacagcggtacggtagtgacaataccggcggcgatcagcagtaaattcaggctcatcgggttttgccccatatggctggtactgctgtcggcaatagcaaacaggtaaattgccgccacgggcagcagccacatggtttcgattaacatgccggtttgcgcttcaacggcaatcttcttgcgtaccagaccgtagaaggcaaaactaaatgccagtcccagcgcgataataggtaggctaccaaaagtccacagctggactaacacgccacatatcgccagaatcaccgccagccattgcatccggcggaatcgctcgccgaggaaaatcatccccagcacaatgttcaccagcgggttaataaagtaaccaaggctcgcttccagcatatggtgattgttcaccgcccagataaacagtagccagttgccaccaatcagcacggcagagactgccagcataaaaattttctgtggcgtctgaatcagcgtttttaaataggaccactggcggcaaatgctcatcagcaccaccataaagaaaaagctccagatcacgcgatgcgtcaggatttcatcggcgggcacgtagtaaatcaacttgaagtacgctggcgctataccccaaataaaataagcggcaagagcgagtaatacgccctgccgcgtttgttttgcatccatcgggaatactcatttttaattggtaacagcagtttacctgcttttatgtcttcaacctaccatataggtggcggtggcactggcaatataaagctgttcttcattgtgtaattcaacgcgggcgacggcgactttattgcctgcacgcaacaggctactagtagcagtaaaacgctcgcccctgcctgggcgcagataatcaacgcgaagatcaatggtccccatccggcttagccgctggcgtagttcatcttcactgatggtttcgtggcgggttaaggtacttcccacgcacaccagaccggcggcgacatccagcgcgctcgcaatgaccccgccgtgcaaaatgctttgcgcccagttgcccaccatcattggctgatttttaaaggccagctgtgcgaactctttttcgtaacgctccagttccatccccaatgcgcggttaaatggcatgtgataaacaaacatctcacccactaatttcagggcttgttcagcggtcagtacggcagacatatcatccttacacttcattggttaatgaaatgttgattttatgcttctttgttgttggtttctactttaggaagggataactaacggctatggagttaagtatgtaaaatagcccgcagaaaaatattcaccttatcaataattcgttacggagaacacgaccgatgcggactctgcagggctggttgttgccggtgtttatgttgcctatggcagtatatgcacaagaggcaacggtgaaagaggtgcatgacgcgccagcggtgcgtggcagtattatcgccaatatgctgcaggagcatgacaatccgttcacgctctatccttatgacaccaactacctcatttacacccaaaccagcgatctgaataaagaagcgattgccagttacgactgggcggaaaatgcgcgtaaggatgaagtaaagtttcagttgagcctggcatttccgctgtggcgtgggattttaggcccgaacagcgtgttgggtgcgtcttatacgcaaaaatcctggtggcaactgtccaatagcgaagagtctagtccgtttcgtgaaaccaactacgaaccgcaattgttcctcggttttgccaccgattaccgttttgcaggttggacgctgcgcgatgtggagatggggtataaccacgactctaacgggcgttccgacccgacctcccgcagctggaaccgcctttatactcgcctgatggcagaaaacggtaactggctggtagaagtgaagccgtggtatgtggtgggtaatactgacgataacccggatatcaccaaatatatgggttactaccagcttaaaatcggctatcacctcggtgatgcggtgctcagtgcgaaaggacagtacaactggaacaccggctacggcggcgcggagttaggcttaagttacccgatcaccaaacatgtgcgcctttatactcaggtttacagcggctatggcgaaagcctcatcgactataacttcaaccagacccgtgtcggtgtgggggttatgctaaacgatttgttttgatgaacggttgagtggttggcaaatctggaatccagcatccaggattaccctctcagagactaaaagcattgcagtttctcgcgcaggcgctgaaaatagcgcctgtttttatttcaggcaatcggggtgaatgtggcgcaggcggaagtgttgaatctggagtccggagctaaacaggttttacaagaaacctttggctaccaacagtttcgccccggccaggaagaaattatcgacactgtgctttccggccgcgattgcctcgtcgtcatgcccactggtggcggaaaatccctttgctatcaaatccctgccttattgctaaacggccttaccgtggttgttagtccgctgattagcttgatgaaagatcaggtggatcaactgcaagccaacggcgtggcggcggcgtgccttaacagcacgcaaacccgcgaacagcaacttgaagtgatgacaggctgccgcaccgggcaaattcgtctgctttatatcgccccggaacgcctgatgctggataactttcttgagcatctggcgcactggaatccggtgttattagccgttgatgaagcgcactgtatctcccaatggggccacgatttccgcccggaatatgccgcgctcggtcagttgcgccagcggttcccgacgctgccgtttatggcgctgaccgccacagccgacgacaccacgcgccaggatatcgtgcgcctgctggggctgaacgatccgctgattcaaatcagcagttttgaccgtccgaatattcgctacatgctgatggagaagttcaaaccgctcgatcagttgatgcgctacgtgcaggaacagcgcggtaagagtggcattatctactgcaacagccgcgcgaaagtagaagacaccgctgcgcgcctgcaaagcaagggaattagcgcggcggcctatcatgccgggctggaaaataatgttcgcgccgatgtgcaggaaaaattccagcgcgatgacctgcaaattgtggtggcgacggtggcgttcggcatgggcatcaataaaccaaacgttcgcttcgtggtccactttgatattccgcgcaatatcgaatcctattatcaggaaaccggacgcgccgggcgtgatggcctgcccgcggaagcgatgctgttttacgatccggctgatatggcgtggctgcgccgttgtctggaagagaagccgcaggggcagttgcaggatatcgagcgccacaaactcaatgcgatgggcgcgtttgccgaagcgcaaacttgccgtcgtctggtattgctgaactattttggcgaagggcgtcaggagccgtgcgggaactgcgatatctgcctcgatccgccgaaacagtacgacggtagtaccgatgctcagattgccctttccaccattggtcgtgtgaatcagcggtttgggatgggttatgtggtggaagtgattcgtggtgctaataaccagcgtatccgcgactatggtcatgacaaactgaaagtctatggcatgggccgtgataaaagccatgaacattgggtgagcgtgatccgccagctgattcacctcggcctggtgacgcaaaatattgcccagcattctgccctacaactgacagaggccgcgcgcccggtgctgcgcggcgaatcctctttgcaacttgccgtgccgcgtatcgtggcgctcaaaccgaaagcgatgcagaaaagcttcggcggcaactatgatcgcaaactgttcgccaaattacgcaaactgcgtaaaagcatagccgatgaaagtaatgtcccgccgtacgtggtgtttaacgacgcaaccttgattgagatggctgaacagatgccgatcaccgccagcgaaatgctcagcgttaacggcgttgggatgcgcaagctggaacgctttggcaaaccgtttatggcgctgattcgtgcgcatgttgatggcgatgacgaagagtaatcagcagcataaaaaagtgccagtatgaagactccgtaaacgtttcccccgcgagtcaaatgtatgttgatgttatttctcaccgtcgccatggtgcacattgtggcgcttatgagccccggtcccgatttcttttttgtctctcagaccgctgtcagtcgttcccgtaaagaagcgatgatgggcgtgctgggcattacctgcggcgtaatggtttgggctgggattgcgctgcttggcctgcatttgattatcgaaaaaatggcctggctgcatacgctgattatggtgggcggtggcctgtatctctgctggatgggttaccagatgctacgtggtgcactgaaaaaagaggcggtttctgcacctgcgccacaggtcgagctggcgaaaagtgggcgcagtttcctgaaaggtttactgaccaatctcgctaatccgaaagcgattatctactttggcagcgtgttcagtttgtttgtcggtgataacgttggcactaccgcgcgctggggcatttttgcgctgatcattgtcgaaacgctggcgtggtttaccgtcgttgccagcctgtttgccctgccgcaaatgcgccgtggttatcaacgtctggcgaagtggattgatggttttgccggggcgttatttgccggatttggcattcatttgattattagccggtgatgccagacgcgtcttcagagtaagtcggataaggcgtttacgccgcatccgacattatttttcacgcatgcctcgcgcttgctaacagcgctcccaccagcataaacaagctgccgaaaatcttattcagcgccttcatctgctttggtcctttaatccatagagcaatccgttgagcaagggtggcgtaaccgatcatcacaataatatcgaccacaatagtggtgacgccgagcacgatatactgcatcagttgcggctgttgcggcatgatgaattgcggaaatagcgccgccagaaacacaatacttttgggattggtgagattcacaaaaactgcgcgctggaacaaatgtcgacggctttgagtagaggccaggcttttaaggtcaattgcaccagcggcgcgccactgctggattcccagccaaatcaagtaagccgcgcctgcccacttcaacacttcaaacgcaatcacactgcgggaaaatagcgtccccaaccccacgccaaccagcacaatatgaatcgccagtccggtctgaagcccagcaatagacgccaccgcgccgcgataaccgtggttgaggctggtggtcatagtgttgattgcaccagagcctgggctcaggcttaaaatgatgcttgtcagcaggtaggcaaaccaccattctaaggtcatgatgaactcccggtgtgtctatttttgtgccacaatacgctactgtcgcagcgttgtgtcaggcacgctaaaaaaaacgattttacgtggtttaagaggcagattacccgatgtttcagcagcaaaaagactgggaaacaagagaaaacgcgtttgctgcttttaccatgggaccgctgactgatttctggcgtcagcgtgatgaagcagagtttactggtgtggatgacattccggtgcgctttgtccgttttcgcgcacagcaccatgaccgggtggtagtcatctgcccggggcgtattgagagctacgtaaaatatgcggaactggcctatgacctgttccatttggggtttgatgtcttaatcatcgaccatcgcgggcagggacgttccggtcgcctgttagccgatccgcatctcgggcatgttaatcgctttaatgattatgttgatgatctggcggcattctggcagcaggaggttcagcccggtccgtggcgtaaacgctatatactggcacatagcatgggcggtgcgatctccacattatttctgcaacgccatccaggtgtatgtgacgccattgcgctaactgcgccaatgtttgggatcgtgattcgtatgccgagttttatggcacggcagatcctcaactgggccgaagcgcatccacgtttccgtgatggctatgcaataggcaccgggcgctggcgcgcgttgccgtttgctatcaacgtactgacccacagcagacagcgatatcgacgtaacttacgcttctatgctgatgacccaacgattcgcgtcggtgggccgacctaccattgggtacgcgaaagtattctggctggcgaacaggtgttagccggtgcgggtgatgacgccacgccaacgcttctcttgcaggctgaagaggaacgcgtggtggataaccgcatgcatgaccgtttttgtgaactccgcaccgccgcgggccatcctgtcgaaggaggacggccgttggtaattaaaggtgcttaccatgagatcctttttgaaaaggacgcaatgcgcagtgtcgcgctccacgccatcgttgattttttcaacaggcataacagtcccagcggaaaccgctctacagaggtttaaatttcttatgtaccaggttgttgcgtctgatttagatggcacgttactttctcccgaccatacgttatccccttacgccaaagaaactctgaagctgctcaccgcgcgcggcatcaactttgtgtttgcgaccggtcgtcaccacgttgatgtggggcaaattcgcgataatctggagattaagtcttacatgattacctccaatggtgcgcgcgttcacgatctggatggtaatctgatttttgctcataacctggatcgcgacattgccagcgatctgtttggcgtagtcaacgacaatccggacatcattactaacgtttatcgcgacgacgaatggtttatgaatcgccatcgcccggaagagatgcgcttttttaaagaagcggtgttccaatatgcgctgtatgagcctggattactggagccggaaggcgtcagcaaagtgttcttcacctgcgattcccatgaacaactgctgccgctggagcaggcgattaacgctcgttggggcgatcgcgtcaacgtcagtttctctaccttaacctgtctggaagtgatggcgggcggcgttagtaaaggccatgcgctggaagcggtggcgaagaaactgggctacagcctgaaggattgtattgcgtttggtgacgggatgaacgacgccgaaatgctgagcatggcggggaaaggctgcattatgggcagtgcgcaccagcgtctgaaagaccttcatcccgagctggaagtgattggtactaatgccgacgacgcggtgccgcattatctgcgtaaactctatttaagctaatcgttctttatttggtcagttgtcaacctgatacttcgctacaatggatacccgttaatcaaagagttttccattgtggcgctacttatcatcaccacgattctgtgggccttctcctttagcttttatggcgagtaccttgcggggcacgtcgatagctattttgcggtgctggtgcgcgttggcctggcggcactcgtttttctgccgtttctgcgtacccgtggcaatagcctgaaaacggtcggcctgtatatgctggtgggcgcgatgcagcttggcgtgatgtatatgctgagtttccgcgcttatctctacctgacggtttccgagctgctgctgttcaccgtgctgacgccgctctacatcacgctgatttatgacatcatgagtaagcgccgtctgcgctggggctatgcctttagcgccttgctggcggtgattggtgccgggattattcgctatgatcaggtcaccgaccatttctggactggcttgctgctggtgcaactctccaatatcacttttgccattggcatggtgggttacaaacgcctgatggaaactcgcccgatgccacagcataacgcctttgcgtggttctatcttggcgcgtttctggtggcagtgattgcatggttcttgctgggaaatgcgcagaaaatgccgcaaaccacgctgcaatggggcattctggtgtttcttggcgtggtggcttccgggattggctactttatgtggaactacggcgcgacgcaggtggacgccggaacgctgggcattatgaataatatgcacgttccggcagggctgctggtaaacctggctatctggcaccaacagccgcactggccaacgtttattacaggcgcgctggtgatcctggccagtctgtgggtgcatcgtaagtgggtcgctccgcgctctagtcaaacggcagatgatcgcaggcgtgattgcgcgctgagcgaataattacaggcgcgctggacttcctggcctcactgtgggtgcatcgtaagtgggtcgctccgcgctcttcacaaacggcagatgatcgcaggcgtgattgcgcgcactgcgaataaacgcttccgtaactggctgacgctgctcgccatcgcgcacggcggcgtacagtcggctccacaagccttcgcccagggttttggtcaccaccagaccctggcgctcaaaactctctactacccaatgcggtagcgcggcaatacccatccgcgcggcaaccatctgaatcaacaataaggtgttatcgacgcttttcagactcgggctgacgcctgccggctgaagaaaatgccgccagacatccagtcgactacgctgcaccggataaattaatagcgtctcgctggcgagatcttccggtgtaattcgcgttttcgccgccagtggatggtcaggtgctaacaccagacgcacttcatagtcgaacatcgggctataatgcaggccactgcgcggcagaatatcggacgtcattaccagatccagctctccctgttgcaaggcgggctgcgggtcaaatgtcacgccgcttttaaaatccatctctacctgcggccagttcttatggaaattttctaacgcgggtgtcagccactgaatacagctatggcactcaatggcaatgcgcagacgcgtctgctgcggttcattgcaggcttgcagggcctggctaatttgcggcagtacctggtttgccagttgcaacaggatttctccctgcggtgtaaagcgtagcggctggctcttacgcacaaatagccggaagccaaggcgttgttccagatcgctaaactggtgagacagggcggattgcgtctgatgcaacgtcgccgcagcggctgcgaggctgccgcagttccgcaacgcttgtagcgttttcaggtgttttacttcgatcatgaaagtccttcacttcggcatgaataatttgcgcttgaggaatatacagtaaccgccaattatggatgtgtaaacatctggacggctaaaatccttcgtcttttaaatttatggtgcgttggctgcgtttctccaccccggtcacttacttcagtaagctcccggggatgaataaacttgccgccttccctaaattcaaaatccataggatttacatataattagaggaagaaaaaatgacaatattgaatcacaccctcggtttccctcgcgttggcctgcgtcgcgagctgaaaaaagcgcaagaaagttattgggcggggaactccacgcgtgaagaactgctggcggtagggcgtgaattgcgtgctcgtcactgggatcaacaaaagcaagcgggtatcgacctgctgccggtgggcgattttgcctggtacgatcatgtactgaccaccagtctgctgctgggtaacgttccggcgcgtcatcagaacaaagatggtagcgtagatatcgacaccctgttccgtattggtcgtggacgtgcgccgactggcgaacctgcggcggcagcggaaatgaccaaatggtttaacaccaactatcactacatggtgccggagttcgttaaaggccaacagttcaaactgacctggacgcagctgctggacgaagtggacgaggcgctggcgctgggccacaaggtgaaacctgtgctgctggggccggttacctggctgtggctggggaaagtgaaaggtgaacaatttgaccgcctgagcctgctgaacgacattctgccggtttatcagcaagtgctggcagaactggcgaaacgcggcatcgagtgggtacagattgatgaacccgcgctggtactggaactaccacaggcgtggctggacgcatacaaacccgcttacgacgcgctccagggacaggtgaaactgctgctgaccacctattttgaaggcgtaacgccaaatctcgacacgattactgcgctgcctgttcagggtctgcatgttgacctcgtacatggtaaagatgacgttgctgaactgcacaagcgcctgccttctgactggttgctgtctgcgggtctgatcaatggtcgtaacgtctggcgcgccgatcttaccgagaaatatgcgcaaattaaggacattgtcggcaaacgtgatttgtgggtggcatcttcctgcagcttgctgcacagccccatcgacctgagcgtggaaacgcgtcttgatgcagaagtgaaaagctggtttgccttcgccctacaaaaatgccatgaactggcactgctgcgcgatgcgctgaacagtggtgacacggcagctctggcagagtggagcgccccgattcaggcacgtcgtcactctacccgcgtacataatccggcggtagaaaagcgtctggcggcgatcaccgcccaggacagccagcgtgcgaatgtctatgaagtgcgtgctgaagcccagcgtgcgcgttttaaactgccagcgtggccgaccaccacgattggttccttcccgcaaaccacggaaattcgtaccctgcgtctggatttcaaaaagggcaatctcgacgccaacaactaccgcacgggcattgcggaacatatcaagcaggccattgttgagcaggaacgtttgggactggatgtgctggtacatggcgaggccgagcgtaatgacatggtggaatactttggcgagcacctcgacggatttgtctttacgcaaaacggttgggtacagagctacggttcccgctgcgtgaagccaccgattgtcattggtgacattagccgcccggcaccgattaccgtggagtgggcgaagtatgcgcaaagcctgaccgacaaaccggtgaaagggatgctgacggggccggtgaccatactctgctggagcttcccgcgtgaagatgtcagccgtgaaaccatcgccaaacagattgcgctggcgctgcgtgatgaagtggccgatctggaagccgctggaattggcatcatccagattgacgaaccggcgctgcgcgaaggtttaccgctgcgtcgtagcgactgggatgcgtatctccagtggggcgtagaggccttccgtatcaacgccgccgtggcgaaagatgacacacaaatccacactcacatgtgttattgcgagttcaacgacatcatggatagcattgcggcgctggacgcagacgtcatcaccatcgaaaccagccgttccgacatggagttgctggagagctttgaagagtttgattatccaaatgaaatcggtcctggcgtctatgacattcacagcccaaacgtaccgagcgtggaatggattgaagccttgctgaagaaagcggcaaaacgcattccggcagagcgcctgtgggtcaacccggactgtggcctgaaaacgcgcggctggccagaaacccgcgcggcactggcgaacatggtgcaggcggcgcagaacttgcgtcgggggtaaaatccaaaccgggtggtaataccacccggtcttttctcattacaggctcttcttcccaccatactgcttaaaccattccagcatacgctgccagccatcttctgcagatgcggcatgatagctcgggcgataatcagcgttgaatgcatgcccggcgtccgggtacacgataatctctgctttcgcattagcagcccgcagcgcctggcgcatggtttcaacgctctcctgcggaatgctgttatcctgaccaccatataagccgagaatcggcgcgttaagatcggttgcgatatcaacaggttgtttcggactattcaggctcttgtcgcccgtcagtttgccgtaccacgccactgcggcttttagctgtggattatgcgcggcatacagccaggtgatacgtccaccccagcagaatccggtgatcattaaacgatgaacatcgccgccgttgcgggaagcccaactggcgacatgatcgagatcggccagcacctggctgtcaggcacttttgctaccagaccgctaagcaacgtggggatatcggcaaaatcattcggatcgccttcgcggaagtaaagttcaggtgcgatagccagatacccctccagcgccagacggcgacaaatgtcgcggatatgttcatgcacgccaaaaatttcctgcactacaatgaccactggcagtgggccatcgctttgctttggtctggcatggtaagcaggcatgttatccccttgactagggatagaggtgaagcccgccacaatcgcgtcgtccggggtctgaacgatggtgctagcgagagggcttgcagcaggtgcaaatccagattgttgtgttgttgccatggtattctccgtacccttataaaaatgttgcgcaatgttaactatagtcagcatgcaacaaatcacattgcctgaatcggctcatcttttatgcagtcctgcagaatgaagggtgatttatgtgatttgcatcacttttggtgggtaaatttatgcaacgcatttgcgtcatggtgatgagtatcacgaaaaaatgttaaacccttcggtaaagtgtctttttgcttcttctgactaaaccgattcacagaggagttgtatatgtccaagtctgatgtttttcatctcggcctcactaaaaacgatttacaaggggctacgcttgccatcgtccctggcgacccggatcgtgtggaaaagatcgccgcgctgatggataagccggttaagctggcatctcaccgcgaattcactacctggcgtgcagagctggatggtaaacctgttatcgtctgctctaccggtatcggcggcccgtctacctctattgctgttgaagagctggcacagctgggcattcgcaccttcctgcgtatcggtacaacgggcgctattcagccgcatattaatgtgggtgatgtcctggttaccacggcgtctgtccgtctggatggcgcgagcctgcacttcgcaccgctggaattcccggctgtcgctgatttcgaatgtacgactgcgctggttgaagctgcgaaatccattggcgcgacaactcacgttggcgtgacagcttcttctgataccttctacccaggtcaggaacgttacgatacttactctggtcgcgtagttcgtcactttaaaggttctatggaagagtggcaggcgatgggcgtaatgaactatgaaatggaatctgcaaccctgctgaccatgtgtgcaagtcagggcctgcgtgccggtatggtagcgggtgttatcgttaaccgcacccagcaagagatcccgaatgctgagacgatgaaacaaaccgaaagccatgcggtgaaaatcgtggtggaagcggcgcgtcgtctgctgtaattctcttctcctgtctgaaggccgacgcgttcggccttttgtatttttgcgtagcgcctcgcaggaaatgcctttccaactggacgtttgtacagcacaattctattttgtgcgggtaagttgttgcgtcaggaggcgttgtggatttcagtatcatggtttacgcagttattgcgttggtgggtgtggcaattggctggctgtttgccagttatcaacatgcgcagcaaaaagccgagcaattagctgaacgtgaagagatggtcgcggagttaagcgcggcaaaacaacaaattacccaaagcgagcactggcgtgcagagtgcgagttactcaataacgaagtgcgcagcctgcaaagtattaacacctctctggaggccgatctgcgtgaagtaaccacgcggatggaagccgcacagcaacatgctgacgataaaattcgccagatgattaacagcgagcagcgcctcagtgagcagtttgaaaacctcgccaaccgtatttttgagcacagcaatcgccgggttgatgagcaaaaccgtcagagtctgaacagcctgttgagcccgctacgtgaacaactggacggtttccgccgtcaggttcaggacagcttcggtaaagaagcacaagaacgccataccctgacccacgaaattcgcaatctccagcaactcaacgcgcaaatggcccaggaagcgatcaacctgacgcgcgcgctgaaaggcgacaataaaacccagggcaactggggcgaggtagtattgacgcgggtgttggaggcttccggtctgcgtgaagggtatgaatatgaaacccaggtcagcatcgaaaatgacgcccgcagccggatgcagccggatgtcatcgtgcgcctgccgcagggaaaagatgtggtgatcgacgccaaaatgacgctggtcgcctatgaacgctattttaacgccgaagacgactacacccgcgaaagcgcgctacaggaacatatcgcgagcgtgcgtaaccatatccgtttgctgggacgcaaagattatcaacagctgccggggctgcgaactctggattacgtgctgatgtttattcccgttgaacccgcttttttactggcgcttgaccgccagccggagctgatcaccgaagcgttgaaaaacaacatcatgctggttagcccgactacgctgctggtggcgctgcgcactatcgccaacctgtggcgttatgagcatcaaagccgcaacgcccagcaaatcgccgatcgtgccagcaagctgtacgacaagatgcgtttgttcatcgatgacatgtccgcgattggtcaaagtctcgacaaagcgcaggataattatcggcaggcaatgaaaaaactctctagtgggcgcggaaatgtgctggcgcaggcagaagcgtttcgcggtttaggagtagaaattaaacgcgagattaatccggatttggctgaacaggcggtgagccaggatgaagagtatcgacttcggagcgttccggagcagccgaatgatgaagcttatcaacgcgatgatgaatataatcagcagagccgctaacccattgggagtagttaagccgggtagaaatctagggcatcgacgcccaatctgttacacttctggaacaattttttgatgagcaggcattgagatggtggataagagtcaagaaacgacgcactttggttttcagaccgtcgcgaaggaacaaaaagcggatatggtcgcccacgttttccattccgtggcaagtaaatacgatgtcatgaatgatttgatgagttttggtattcatcgtttgtggaagcgattcacgattgattgcagcggcgtacgccgtgggcagaccgtgctggatctggctggtggcaccggcgacctgacagcgaaattctcccgcctggtcggagaaactggcaaagtggtccttgctgatatcaatgaatccatgctcaaaatgggccgcgagaagctgcgtaatatcggtgtgattggcaacgttgagtatgttcaggcgaacgctgaggcgctgccgttcccggataacacctttgattgcatcaccattagctttggtctgcgtaacgtcaccgacaaagataaagcactgcgtagtatgtatcgcgtgctgaaacccggcggccgcctgctggtgcttgagttcagcaagccaattatcgagccgctgagcaaagcctatgatgcatactccttccatgtgctgccgcgtattggcagtctggtcgcgaacgacgccgacagctaccgttatctggcagaatccatccgtatgcatcccgatcaggataccctgaaagccatgatgcaggatgccggattcgaaagtgtcgactactacaatctgacggcaggggttgtggcgctgcatcgtggttataagttctgacaggagaccggaaatgccttttaaacctttagtgacggcaggaattgaaagtctgctcaacaccttcctgtatcgcagtcccgcgctgaaaacggcccgcagccgtctgctgggtaaagtattgcgcgtggaggtaaaaggctttagcacgagtttgattctggtgttcagcgaacgccaggttgatgtactgggcgaatgggcaggcgatgctgactgcaccgttatcgcctacgccagtgtgttgccgaaacttcgcgatcgccagcagcttaccgcactgattcgcagtggtgagctggaagtgcagggcgatattcaggtggtgcaaaacttcgttgcgctggcagatctggcagagttcgaccctgcggaactgctggccccttataccggtgatatcgccgctgaaggaatcagcaaagccatgcgcggaggcgcaaagttcctgcatcacggcattaagcgccagcaacgttatgtggcggaagccattactgaagagtggcgtatggcacccggtccgcttgaagtggcctggtttgcggaagagacggctgccgtcgagcgtgctgttgatgccctgaccaaacggctggaaaaactggaggctaaatgacgccaggtgaagtacggcgcctatatttcatcattcgcacttttttaagctacggacttgatgaactgatccccaaaatgcgtatcaccctgccgctacggctatggcgatacagtttattctggatgccaaatcggcataaagacaaacttttaggtgagcgactacgactggccctgcaagaactggggccggtttggatcaagttcgggcaaatgttaagtacccgccgcgatctttttccaccgcatattgccgatcagctggcgttattgcaggacaaagttgctccgtttgatggcaagctggcgaagcagcagattgaagctgcaatgggcggcttgccggtagaagcgtggtttgacgattttgaaatcaagccgctggcttctgcttctatcgcccaggttcataccgcgcgattgaaaagcaatggtaaagaggtggtgattaaagtcatccgcccggatattttgccggttattaaagcggatctgaaacttatctaccgtctggctcgctgggtgccgcgtttgctgccggatggtcgccgtctgcgcccaaccgaagtggtgcgcgagtacgaaaagacattgattgatgaactgaatttgctgcgggaatctgccaacgccattcagcttcggcgcaattttgaagacagcccgatgctctacatcccggaagtttaccctgactattgtagtgaagggatgatggtgatggagcgcatttacggcattccggtgtctgatgttgcggcgctggagaaaaacggcactaacatgaaattgctggcggaacgcggcgtgcaggtgttcttcactcaggtctttcgcgacagctttttccatgccgatatgcaccctggcaacatcttcgtaagctatgaacacccggaaaacccgaaatatatcggcattgattgcgggattgttggcagcctaaacaaagaagataaacgctatctggcagaaaactttatcgccttctttaatcgcgactatcgcaaagtggcagagctacacgtcgattctggctgggtgccaccagataccaacgttgaagagttcgaatttgccattcgtacggtctgtgaacctatctttgagaaaccgctggccgaaattagctttggacatgtactgttaaatctgtttaatacggcgcgtcgcttcaatatggaagtgcagccgcaactggtgttactccagaaaaccctgctctacgtcgaaggggtaggacgccagctttatccgcaactcgatttatggaaaacggcgaagcctttcctggagagctggattaaagatcaggtcggtattcctgcgctggtgagagcatttaaagaaaaagcgccgttctgggtcgaaaaaatgccagaactgcctgaattggtttacgacagtttgcgccagggcaagtatttacagcacagtgttgataagattgcccgcgagcttcagagtaatcatgtacgtcagggacaaagccgttattttctcggaattggcgctacgttagtattaagtggcacattcttgttggtcagccgacctgaatgggggctgatgcccggctggttaatggcaggtggtctgatcgcctggtttgtcggttggcgcaaaacacgctgattttttcatcgctcaaggcgggccgtgtaacgtataatgcggctttgtttaatcatcatctaccacagaggaacatgtatgggtggtatcagtatttggcagttattgattattgccgtcatcgttgtactgctttttggcaccaaaaagctcggctccatcggttccgatcttggtgcgagcatcaaaggctttaaaaaagcaatgagcgatgatgaaccaaagcaggataaaaccagtcaggatgctgattttactgcgaaaactatcgccgataagcaggcggatacgaatcaggaacaggctaaaacagaagacgcgaagcgccacgataaagagcaggtgtaatccgtgtttgatatcggttttagcgaactgctattggtgttcatcatcggcctcgtcgttctggggccgcaacgactgcctgtggcggtaaaaacggtagcgggctggattcgcgcgttgcgtagtctggcgacaacggtgcagaacgaactgacccaggagttaaaactccaggagtttcaggacagtctgaaaaaggttgaaaaggcgagcctcactaacctgacgcccgaactgaaagcgagcatggatgaactacgccaggccgcggagagcatgaagcgttcctacgttgcaaacgatcctgaaaaggcgagcgatgaagcgcacaccatccataacccggtggtgaaagataatgaagctgcgcatgagggcgtaacgcctgccgctgcacaaacgcaggccagtagcccggaacagaagccagaaaccacgccagagccggtggtaaaacctgctgcggacgctgaaccgaaaaccgctgcaccttcccctagcagcagtgataaaccgtaaacatgtctgtagaagatactcaaccgcttatcacgcatctgattgagctgcgtaagcgtctgctgaactgcattatcgcggtgatcgtgatattcctgtgtctggtctatttcgccaatgacatctatcacctggtatccgcgccattgatcaagcagttgccgcaaggtagtacgatgatcgccaccgacgtggccagcccgttctttacgccgatcaagctgacctttatggtgagcctgattctgagtgcgccggtgattctctatcaggtgtgggcatttatcgccccagcgctgtataagcatgaacgtcgcctggtggtgccgctgctggtttccagctctctgctgttttatatcggcatggcattcgcctactttgtggtctttccgctggcatttggcttccttgccaataccgcgccggaaggggtgcaggtatccaccgacatcgccagctatttaagcttcgttatggcgctgtttatggcgtttggtgtctcctttgaagtgccggtagcaattgtgctgctgtgctggatggggattaccagcccagaagacttacgcaaaaaacgcccgtatgtgctggttggtgcattcgttgtcgggatgttgctgacgccgccggatgtcttcagccaaacgctgttggcgatcccgatgtactgtctgtttgaaatcggtgtcttcttcagtcgcttttacgttggtaaagggcgaaatcgggaagaggaaaacgacgctgaagcagaaagcgaaaaaactgaagaataaattcaaccgcccgtcagggcggttgtcatatggagtacaggatgtttgatatcggcgttaatttgaccagtagccaatttgcgaaagaccgtgatgatgttgtagcgtgcgcttttgacgcgggagttaatgggctactcatcaccggcactaacctgcgtgaaagccagcaggcgcaaaagctggcgcgtcagtatagctcctgttggagtacggcgggcgtacatcctcacgacagcagccagtggcaagctgcgactgaagaagcgattattgagctggccgcgcagccagaagtggtggcgattggtgaatgtggtctcgactttaaccgcaactttagcacgccggaagagcaggaacgcgcttttgttgcccagctacgcattgccgcagatttaaacatgccggtatttatgcactgtcgcgatgcccacgagcggtttatgacattgctggagccgtggctggataaactgcctggtgcggttcttcattgctttaccggcacacgcgaagagatgcaggcgtgcgtggcgcatggaatttatatcggcattaccggttgggtttgcgatgaacgacgcggactggagctgcgggaacttttgccgttgattccggcggaaaaattactgatcgaaactgatgcgccgtatctgctccctcgcgatctcacgccaaagccaagttcccggcgcaacgagccagcccatctgccccatattttgcaacgtattgcgcactggcgtggagaagatgccgcatggctggctgccaccacggatgctaatgtcaaaacactgtttgggattgcgttttaaagtttgcggaactcggtattcttcacactgtgcttaatctctttattaataagattaagcaatagcatggagcgagcctcaccatcgggttcggtgaaaatggcctgaaagccttcgaacgcgccttcggtaataatcaccttatcacccggataaggggttgccggatcgacaatgtctttcggtttatatacgcttagctgatgaataaccgcgcttgggactatcgctgggctcgcgccaaagcgcacgaagtggctgacaccgcgggtcgcgttgatagtcgtggtatgaatcacttctgggtcaaattccacaaacaggtagttggggaacaatggctcactgactgcagtacgttttccacgcacgattttttccagggtgatcatcggtgccaggcaattcacagcctgtctttcgaggtgttcctgggcacgttgaagttgcccgcgcttgcagtacagtaaataccaggattgcataatgactcttatccgtttaatcggggcgcaaggatagcaaaagctttacgctaagttaattatattccccggtttgcgttataccgtcagagttcacgctaatttaacaaatttacagcatcgcaaagatgaacgccgtataatgggcgcagattaagaggctacaatggacgccatgaaatataacgatttacgcgacttcttgacgctgcttgaacagcagggtgagctaaaacgtatcacgctcccggtggatccgcatctggaaatcactgaaattgctgaccgcactttgcgtgccggtgggcctgcgctgttgttcgaaaaccctaaaggctacagtatgccggtgctgtgcaacctgttcggtacgccaaagcgcgtggcgatgggcatggggcaggaagatgttagcgcgctgcgtgaagttggtaaattattggcgtttctgaaagagccggagccgccaaaaggtttccgcgacctgtttgataaactgccgcagtttaagcaagtattgaacatgccgacaaagcggctgcgtggtgcgccctgccaacaaaaaatcgtctctggcgatgacgtcgatctcaatcgcattcccattatgacctgctggccggaagatgccgcgccgctgattacctgggggctgacagtgacgcgcggcccacataaagagcggcagaatctgggcatttatcgccagcagctgattggtaaaaacaaactgattatgcgctggctgagccatcgcggcggcgcgctggattatcaggagtggtgtgcggcgcatccgggcgaacgtttcccggtttctgtggcgctgggtgccgatcccgccacgattctcggtgcagtcactcccgttccggatacgcttagtgagtatgcgtttgccggattgctacgtggcaccaagaccgaagtggtgaagtgtatctccaatgatcttgaagtgcccgccagtgcggagattgtgctggaagggtatatcgaacaaggcgaaactgcgccggaagggccgtatggcgaccacaccggttactataatgaagtcgatagtttcccggtatttaccgtgacgcatattacccagcgtgaagatgcgatttaccattccacctataccgggcgtccgccagatgagcccgcggtgctgggtgtcgcactgaacgaagtgtttgtgccgattctgcaaaaacagttcccggaaattgtcgatttttacctgccgccggaaggctgctcttatcgcctggcggtagtgacaatcaaaaaacagtacgccggacacgcgaagcgcgtcatgatgggcgtctggagcttcttacgccagtttatgtacactaaatttgtgatcgtttgcgatgatgacgttaacgcacgcgactggaacgatgtgatttgggcgattaccacccgtatggacccggcgcgggatactgttctggtagaaaatacgcctattgattatctggattttgccagccctgtctccgggctgggtagtaaaatggggctggatgccacgaataaatggccgggggaaacccagcgtgaatggggacgtcccatcaaaaaagatccagatgttgtcgcgcatattgacgccatctgggatgaactggctatttttaacaacggtaaaagcgcctgatgcgcgtttgttttgccctatttatcgatccgacagagaaagcgcatgacaaccttaagctgtaaagtgaccagcgtagaagctatcacggataccgtatatcgtgtccgcatcgtgccagacgcggccttttcttttcgtgctggtcagtatttgatggtagtgatggatgagcgcgacaaacgtccgttcagtatggctagcacgccggatgaaaaagggtttatcgagctgcatattggcgcttctgaaatcaacctttacgcgaaagcagtcatggaccgcatcctcaaagatcatcaaatcgtggtcgacattccccacggagaagcgtggctgcgcgatgatgaagagcgtccgatgattttgattgcgggcggcaccgggttctcttatgcccgcagcattttgctgacagcgttggcgcgtaacccaaaccgtgatatcaccatttactggggcgggcgtgaagagcagcatctgtatgatctctgcgagcttgaggcgcttagcttgaagcatcctggtctgcaagtggtgccggtggttgaacaaccggaagcgggctggcgtgggcgtactggcaccgtgttaacggcggtattgcaggatcacggtacgctggcagagcatgatatctatattgccggacgttttgagatggcgaaaattgcccgcgatctgttttgcagtgagcgtaatgcgcgggaagatcgcctgtttggcgatgcgtttgcatttatctgagatataaaaaaacccgcccctgacaggcgggaagaacggcaactaaactgttattcagtggcatttagatctatgacgtatctggcaaaccatgcccgatgcgacgctgtcgcgtcttatcgtgcctacaaatagtccgaaccgtaggccggataaggcgtttacgccgcatccggcaattggtgcatgatgcctgatgcgacgctgtcgcgtcttatcgtgcctacaaatagtccgaaccgtaggccggataaggcgtttacgccgcatccggcaattggtgcatgatgcctgatgcgacgctggcgcgtcttatcaggcctacattggtgccggatcggtagaccggataaggcgttcacgccgcatccggcaagtggttaaacccgctcaaacaccgtcgcaataccctgacccagaccgatacacatcgtcgccagaccaaactgaacgtctttgcgttccatcagattcagcagcgtggtgctgatacgcgcaccggaacaacccagcggatgacccagcgcgatcgcgccaccgttgaggttgatcttctcgtcaatctgctcaattagtcccagatctttaatacatggcaggatctgcgcggcaaaggcttcgttcatttcaaacacgccgatatcgctggcagaaagccccgcttttttcagcgccagtttgctggccggaaccgggccgtaacccataatgcttgggtcacaaccaacgaccgccatgctacgcacacgagcgcgcggcttaagacctaattcatgggcgcggctttcactcatcaccagcatggcagctgcgccatcggaaagtgcagaagatgtgcccgccgttaccataccgtttactggatcaaacgccggacgcagcgtggcgagggcttccacggtggtttccgggcgaatcacttcgtcgtaattaaactgcttcaggacgccgtcggcatcgtgaccaccggtcgggatgatttcatttttaaatgcggcgctctgcgtggcggcccaggcgcgggcgtgactccgcgcggcaaaggcatcctgcatttcacggctgataccgtgcatacgcgccagcatttctgccgttaagcccatcatgcccgccgctttggcgacattgcggctcaggccggggtgaaaatcgacgccgtgactcatcggcacatggcccatatgctccacgccgccaaccagacatgcctgcgcatcgccagtcatgatcattcgtgctgcgtcatgcagtgcctgcatggaactaccacacaagcgattaacggtaaccgccgggacagagtgtggtacttctgccagcagcgccgcgttacgggcgatattaaaaccctgctccagcgtctgctgcacacaaccccagtaaatatcgtcgagggccgccgcttccagcgccgggttacgcgccagcaggctacgcattaaatgagcggagagatcttctgcacgcacgttacgaaaagcaccgcccttgctacggcccatcggggtgcgaattgcatcgacaatgacaacctgttccattgtgactccttaagccgttttcaggtcgccaaccggacgggctggctcaaccggaggatagtacggttcgttatgacgcgctttattacgcagaccttccggcacttcatacagcgggccgaggtgctgatattgctgtgccatatcgaggtattttgcgctaccgagggtgtccagccagcggaacgcgccgccgtggaacggagggaagcccaggccgtagaccagcgccatatccgcttccgccggagtggcgataatgccttcctccagacagcgcaccacttcgttgaccatcgggatcatcatgcgggcgataatctcttcttcgctgaaatcgcgcttcggctggctcacttctgccagcaggtcttcaacggcggcgtcttcttctttcttcggcttacctttgctgtcttctttataacgccagaaaccgaggccgttcttctgaccaaagcggttggcatcaaacagcgcgtcgatggcatcgcggtaatctttctgcatccgctgcgggaagcctgctgccatgacagcctgagcgtgatgcgcggtatcaatgcccacaacgtccagcagatatgccgggcccatcggccagccaaactgtttttccatcactttgtcgatcttgcggaaatccgcgccgtcgcgcagcagctggctgaaaccggcgaaatacgggaacagcacgcggttaacaaagaagccggggcagtcgttaaccacaatcggcgtcttgcccatcttgctcgcccaggcgacaactttcgcgatggtttcgtcggagcttttctcgccgcgaataatttctaccaacggcattcggtggaccgggttaaagaagtgcatcccgcagaagttttccgggcgttccagcgcgttggccagttcgctgataggaatggtactagtgttagacgccagcacggtatcctggcgtactttttgttcggtttctgccagtacggcttttttcactttcgggttttcaacaaccgcttctaccacaatatccacgcggtcaaatccggcgtagtcgagcgttgggtggattgtggagatcacgccagccagtttcagaccatcgatcttgccgcgctcaagctgcttgttcagcagtttcgcggcttcggtcatgccgagggttaagctcttgtcgttgatatctttcatgacaaccggcacgcctttccacgcagactggtaagcgatgccgccgcccataatgcctgcacccagcaccgcggcctgtttcggggtttcaacgtctttggtgagtttcttcgctttgccttttacatattgatcgttaaggaaaatgccgaccagtgcgcgggcttcgttggtatgcgccagcgggacaaaacttttgttttccaggtttaaggcttcttcacgaccaaaacgggccgcagcttcaatggtttttactgcggtgatgggggccggataatgtttccccgctgtttgtgcgaccatccctttagcgatggtgaagctcatggtggcttcaatcttgctcagttttagtggttccagcttcggctgacgttttgctttccagtcgaggtcgccgttaatggcctggcgtaaaaccgcctttgcgccttcaaccagtttttctgctttgactacgccatccaccagaccgattttcagcgcctgatccgcgccgacatctttaccggcggcaatgatttccagcgcactgtcagcgcccagcatacgtggcatacgtacagaaccgccaaagccaggcatgatgcccagtttggtttccggcagaccgatgcgcagatccggcgtcgccagacgataatcggtcgccagcacgcattcgcagccaccgcccagcgcatagccattgacggcagcaatggtcggcaccggcagatcttccaggcgattaaacacgctattggcaaagtgcagccactgacttaactgttcttcaggaacgaggaacagggacaaaaattcggtgatatcagcaccgacgataaaggctgctttgttgctacgcagcagcagcccttttagatcactttgctgttccagcacgccgatggcctcgccgaggctggcgacggtcgcagtgtcgagtttattaacactacctggggcatcaaataccagttcggcaatgccatcttccagccagtcaaggtacagggtgtcgcctttgtaaagcatgtcagtctcctgaatccgcaaggtgatctggtcgtaccagatgagtcgaagtgtgtattttgtgttaaaaatatgcaaacaaaagattaaagaaatgccgatctgatcacgctcggcagaaatcacgctctggatgaacgatgtgctaagatgcggagacttaaggtcaaaaaaacagaagggtaaaaaatggaaagtctggccagcctctataaaaatcatatagctaccttacaagaacggactcgcgatgcgctggcgcgcttcaagctggatgcgttacttattcactccggcgagctgttcaatgtttttctcgacgatcatccctatccgtttaaagtgaacccgcaattcaaagcgtgggtgccggtaactcaggtgccaaactgctggttgctggtggatggcgtgaacaagccgaaactgtggttctatctgccggttgattactggcacaacgtcgaaccgctgccgacctctttctggactgaagatgtggaagtgatcgcgctgccgaaagccgatggcattggtagcctgctgcctgctgcgcgcggcaatatcggttatatcggtccggtgccggaacgtgcgctgcaactgggtattgaggccagcaacatcaacccgaaaggggttatcgactacctgcattactatcgctccttcaaaactgagtacgaactggcctgtatgcgtgaagcgcagaaaatggcggtcaacggtcaccgcgcggcagaagaagcgttccgttctggcatgagcgagttcgatatcaacattgcctatctgaccgcgaccggtcatcgtgataccgacgtaccttacagcaacattgtggcgcttaacgaacacgctgcggtactgcattacaccaaactggaccatcaggcaccggaagagatgcgcagcttcctgctggatgccggggcagaatataacggctatgcggctgacctgacccgtacctggagcgcaaaaagtgacaacgactacgcgcagctggtgaaggacgttaatgatgaacaactggcgctgatcgccaccatgaaagcaggcgtcagctatgtggattaccacatccagttccatcagcgcatcgccaaactgctgcgtaaacatcaaatcatcaccgatatgagtgaagaagcgatggtcgaaaacgatcttaccgggccgtttatgccgcatggtatcggccatccgctgggcctgcaggtgcatgacgtcgctggttttatgcaggatgatagcggtacgcacctcgcggcaccggcaaaatatccgtacctgcgctgcacccgtattctccagccgggcatggtgttaaccatcgaaccgggtatctacttcatcgaaagcctactggcaccgtggcgtgaagggcagttcagcaagcacttcaactggcagaaaattgaagcactgaaaccgttcggcggcattcgtatcgaagacaacgtggtgatccacgaaaacaacgtggaaaacatgacccgggatctgaaactggcgtgatggaaagctggttaattcctgcggcaccggtcacggtcgttgaagagatcaaaaagagccgcttcataacgatgttggcgcataccgatggcgttgaggcggcgaaagcgtttgttgaaagcgtgcgggcagaacaccccgatgcccggcaccattgcgtggcgtgggtcgcgggtgcgccggatgattctcaacagctgggtttctctgacgacggggagccggcgggaacggcaggtaaaccgatgctcgcccagctaatgggcagcggcgtcggggaaattaccgctgtggtagtgcgctactacggcggcatattgcttggcaccggtgggttagtgaaagcgtatggcggcggcgtgaatcaggcgctgcgccagctaacgacccaacgcaagacgccattaaccgaatatactttgcaatgtgaatatcatcagttaaccggcattgaagcgttgctggggcagtgtgacggcaaaattatcaacagtgattatcaggcattcgttctgctgcgggtggcgcttccggcggcgaaagtggctgaattttccgcaaagctggcggattttagccgtggtagtttgcaattgttagcgattgaagaataatccccacttcgttttgcagaactaaggaagcggcagagatgcattttcgcgccattacccgaatcgttggactactggtcatcttatttagtgggaccatgattatccctgggctggtagcactcatctaccgggatggagcgggccgcgcttttacccagaccttttttgtcgccctcgccattggctctatgctgtggtggccgaaccgcaaagagaaaggcgaacttaaatcccgtgaggggtttctgatagtggtgctgttctggaccgtgctgggtagcgtcggtgcgctcccttttatcttcagcgaaagcccgaacctcacgattaccgatgcgttttttgaatctttctctggcctgaccactacgggagccactacgctggtggggctggatagcctccctcacgccatcctcttttatcgccagatgctgcaatggtttggcgggatggggatcatcgtgttggcggttgcgatactgcctatcctcggcgtgggtgggatgcagctctatcgcgcagaaatgcccggcccgctgaaagataacaaaatgcgcccgcgaattgcggaaacggcgaaaaccctgtggttgatttatgtcttgctgaccgtcgcctgtgcgctggcgttgtggtttgccggaatggatgcctttgatgccatcggccatagctttgcgactatcgctattggcggcttcagcacacatgatgccagtatcggttatttcgatagcccgactattaacactatcattgctatcttcctgctgatctccggctgtaactacggtctgcactttagtctgttaagtgggcgtagtctgaaggtttattggcgcgatccggaatttcgcatgtttatcggcgtacagtttacgctggtggttatttgtaccctcgtactgtggtttcataatgtctacagtagcgcgctgatgacaattaaccaggcgtttttccaggtggtgagcatggcgacaaccgccgggtttacaactgacagcattgcccgctggccgctctttttgccggtactgcttttatgtagtgcctttatcggcggttgcgccgggagtacgggcggtggcctgaaggtgatccgcatcctgctgctgtttaagcaggggaaccgtgagctgaaacgactggtgcatccgaacgccgtctatagcattaagctggggaatcgcgcactgccggaacgtatcctcgaagccgtttggggatttttctccgcctatgcattggtgtttattgtcagtatgctggcgattatcgccacgggcgtggatgacttttctgcctttgcgagcgttgttgcgacattgaataacctggggccagggcttggcgtggttgctgataactttaccagtatgaacccggtggctaaatggatcctgattgccaacatgctgtttggtcgtctcgaggtctttacattgctggtgctctttaccccgactttctggcgtgaatgatggagtaatacgtgaaaacattaattcttttcagtacaagggacggacaaacgcgcgagattgcctcctacctggctagcgaactgaaagaactggggatccaggcggatgtcgccaatgtgcaccgcattgaagaaccacagtgggaaaactatgaccgtgtggtcattggtgcttctattcgctatggtcactaccatagtgcgttccaggaatttgtcaaaaaacatgcgacgcggctgaatagcatgccgagcgccttttactccgtgaatctggtggcgcgcaaaccggagaagcgtactccacagaccaacagctacgcgcgcaagtttctgatgaacagccaatggcgtcccgatcgctgcgcggtcattgccggggcgctgcgttacccacgttatcgctggtacgaccgttttatgatcaagctgattatgaagatgagtggcggtgaaacggatacgcgcaaagaagttgtctataccgattgggagcaggtggcgaatttcgcccgagaaatcgcccatttaaccgacaaaccgacgctgaaataagcataaagaataaaaaatgcgcggtcagaaaattattttaaatttcctcttgtcaggccggaataactccctataatgcgccaccactgacacggaacaacggcaaacacgccgccgggtcagcggggttctcctgagaactccggcagagaaagcaaaaataaatgcttgactctgtagcgggaaggcgtattatgcacaccccgcgccgctgagaaaaagcgaagcggcactgctctttaacaatttatcagacaatctgtgtgggcactcgaagatacggattcttaacgtcgcaagacgaaaaatgaataccaagtctcaagagtgaacacgtaattcattacgaagtttaattctttgagcgtcaaacttttaaattgaagagtttgatcatggctcagattgaacgctggcggcaggcctaacacatgcaagtcgaacggtaacaggaagaagcttgcttctttgctgacgagtggcggacgggtgagtaatgtctgggaaactgcctgatggagggggataactactggaaacggtagctaataccgcataacgtcgcaagaccaaagaggggtaccttcgggcctcttgccatcggatgtgcccagatgggattagctagtaggtggggtaacggctcacctaggcgacgatccctagctggtctgagaggatgaccagccacactggaactgagacacggtccagactcctacgggaggcagcagtggggaatattgcacaatgggcgcaagcctgatgcagccatgccgcgtgtatgaagaaggccttcgggttgtaaagtactttcagcggggaggaagggagtaaagttaatacctttgctcattgacgttacccgcagaagaagcaccggctaactccgtgccagcagccgcggtaatacggagggtgcaagcgttaatcggaattactgggcgtaaagcgcacgcaggcggtttgttaagtcagatgtgaaatccccgggctcaacctgggaactgcatctgatactggcaagcttgagtctcgtagaggggggtagaattccaggtgtagcggtgaaatgcgtagagatctggaggaataccggtggcgaaggcggccccctggacgaagactgacgctcaggtgcgaaagcgtggggagcaaacaggattagataccctggtagtccacgccgtaaacgatgtcgacttggaggttgtgcccttgaggcgtggcttccggagctaacgcgttaagtcgaccgcctggggagtacggccgcaaggttaaaactcaaatgaattgacgggggcccgcacaagcggtggagcatgtggtttaattcgatgcaacgcgaagaaccttacctggtcttgacatccacggaagttttcagagatgagaatgtgccttcgggaaccgtgagacaggtgctgcatggctgtcgtcagctcgtgttgtgaaatgttgggttaagtcccgcaacgagcgcaacccttatcctttgttgccagcggtccggccgggaactcaaaggagactgccagtgataaactggaggaaggtggggatgacgtcaagtcatcatggcccttacgaccagggctacacacgtgctacaatggcgcatacaaagagaagcgacctcgcgagagcaagcggacctcataaagtgcgtcgtagtccggattggagtctgcaactcgactccatgaagtcggaatcgctagtaatcgtggatcagaatgccacggtgaatacgttcccgggccttgtacacaccgcccgtcacaccatgggagtgggttgcaaaagaagtaggtagcttaaccttcgggagggcgcttaccactttgtgattcatgactggggtgaagtcgtaacaaggtaaccgtaggggaacctgcggttggatcacctccttaccttaaagaagcgttctttgaagtgctcacacagattgtctgatgaaaatgagcagtaaaacctctacaggcttgtagctcaggtggttagagcgcacccctgataagggtgaggtcggtggttcaagtccactcaggcctaccaaatttgcacggcaaatttgaagaggttttaactacatgttatggggctatagctcagctgggagagcgcctgctttgcacgcaggaggtctgcggttcgatcccgcatagctccaccatctctgtagtgattaaataaaaaatacttcagagtgtacctgcaaaggttcactgcgaagttttgctctttaaaaatctggatcaagctgaaaattgaaacactgaacaacgaaagttgttcgtgagtctctcaaattttcgcaacacgatgatgaatcgaaagaaacatcttcgggttgtgaggttaagcgactaagcgtacacggtggatgccctggcagtcagaggcgatgaaggacgtgctaatctgcgataagcgtcggtaaggtgatatgaaccgttataaccggcgatttccgaatggggaaacccagtgtgtttcgacacactatcattaactgaatccataggttaatgaggcgaaccgggggaactgaaacatctaagtaccccgaggaaaagaaatcaaccgagattcccccagtagcggcgagcgaacggggagcagcccagagcctgaatcagtgtgtgtgttagtggaagcgtctggaaaggcgtgcgatacagggtgacagccccgtacacaaaaatgcacatgctgtgagctcgatgagtagggcgggacacgtggtatcctgtctgaatatggggggaccatcctccaaggctaaatactcctgactgaccgatagtgaaccagtaccgtgagggaaaggcgaaaagaaccccggcgaggggagtgaaaaagaacctgaaaccgtgtacgtacaagcagtgggagcacgcttaggcgtgtgactgcgtaccttttgtataatgggtcagcgacttatattctgtagcaaggttaaccgaataggggagccgaagggaaaccgagtcttaactgggcgttaagttgcagggtatagacccgaaacccggtgatctagccatgggcaggttgaaggttgggtaacactaactggaggaccgaaccgactaatgttgaaaaattagcggatgacttgtggctgggggtgaaaggccaatcaaaccgggagatagctggttctccccgaaagctatttaggtagcgcctcgtgaattcatctccgggggtagagcactgtttcggcaagggggtcatcccgacttaccaacccgatgcaaactgcgaataccggagaatgttatcacgggagacacacggcgggtgctaacgtccgtcgtgaagagggaaacaacccagaccgccagctaaggtcccaaagtcatggttaagtgggaaacgatgtgggaaggcccagacagccaggatgttggcttagaagcagccatcatttaaagaaagcgtaatagctcactggtcgagtcggcctgcgcggaagatgtaacggggctaaaccatgcaccgaagctgcggcagcgacactatgtgttgttgggtaggggagcgttctgtaagcctgtgaaggtgtgctgtgaggcatgctggaggtatcagaagtgcgaatgctgacataagtaacgataaagcgggtgaaaagcccgctcgccggaagaccaagggttcctgtccaacgttaatcggggcagggtgagtcgacccctaaggcgaggccgaaaggcgtagtcgatgggaaacaggttaatattcctgtacttggtgttactgcgaaggggggacggagaaggctatgttggccgggcgacggttgtcccggtttaagcgtgtaggctggttttccaggcaaatccggaaaatcaaggctgaggcgtgatgacgaggcactacggtgctgaagcaacaaatgccctgcttccaggaaaagcctctaagcatcaggtaacatcaaatcgtaccccaaaccgacacaggtggtcaggtagagaataccaaggcgcttgagagaactcgggtgaaggaactaggcaaaatggtgccgtaacttcgggagaaggcacgctgatatgtaggtgaagcgacttgctcgtggagctgaaatcagtcgaagataccagctggctgcaactgtttattaaaaacacagcactgtgcaaacacgaaagtggacgtatacggtgtgacgcctgcccggtgccggaaggttaattgatggggttagccgcaaggcgaagctcttgatcgaagccccggtaaacggcggccgtaactataacggtcctaaggtagcgaaattccttgtcgggtaagttccgacctgcacgaatggcgtaatgatggccaggctgtctccacccgagactcagtgaaattgaactcgctgtgaagatgcagtgtacccgcggcaagacggaaagaccccgtgaacctttactatagcttgacactgaacattgagccttgatgtgtaggataggtgggaggctttgaagtgtggacgccagtctgcatggagccgaccttgaaataccaccctttaatgtttgatgttctaacgttgacccgtaatccgggttgcggacagtgtctggtgggtagtttgactggggcggtctcctcctaaagagtaacggaggagcacgaaggttggctaatcctggtcggacatcaggaggttagtgcaatggcataagccagcttgactgcgagcgtgacggcgcgagcaggtgcgaaagcaggtcatagtgatccggtggttctgaatggaagggccatcgctcaacggataaaaggtactccggggataacaggctgataccgcccaagagttcatatcgacggcggtgtttggcacctcgatgtcggctcatcacatcctggggctgaagtaggtcccaagggtatggctgttcgccatttaaagtggtacgcgagctgggtttagaacgtcgtgagacagttcggtccctatctgccgtgggcgctggagaactgaggggggctgctcctagtacgagaggaccggagtggacgcatcactggtgttcgggttgtcatgccaatggcactgcccggtagctaaatgcggaagagataagtgctgaaagcatctaagcacgaaacttgccccgagatgagttctccctgactccttgagagtcctgaaggaacgttgaagacgacgacgttgataggccgggtgtgtaagcgcagcgatgcgttgagctaaccggtactaatgaaccgtgaggcttaaccttacaacgccgaaggtgttttggcggattgagagaagattttcagcctgatacagattaaatcagaacgcagaagcggtctgataaaacagaatttgcctggcggcagtagcgcggtggtcccacctgaccccatgccgaactcagaagtgaaacgccgtagcgccgatggtagtgtggggtctcctcatgcgagagtagggaactgccaggcatcaaataaaacgaaaggctcagtcggaagactgggcctttcgttttatctgttgtttgtcggtgaacgctctcctgagtaggacaaatccgccgggagcggatttgaacgttgcgaagcaacggcccggagggtggcgggcaggacgcccgccataaactgccaggcatcaaattaagcagaaggccatcctgacggatggcctttttgcattggcgcagaaaaaaatgccggatgcgacgctggcgcgtcttatccagcctactcttgcttatccgttctgcttttgcatccactccaccacaaaatcagccagcccctcaacatcattaatatccagtaatgcgacatcaagattaagcggcacatcactggctacagcaataacatgcctgtctatcactaattcttcaggtcgatgtccggctccatcgcgaaacagcacaatctttgcgatctcttcatgcttaaacccttcgaccagaatcaaatccagcttactggtatccattcgacttgcgagaaactgtagatccagctcttcttcgtctggtgtttccgtcatcaaggcccatcgttgctggctggcaacgatggtttgtaccgcgccagccttgcgcagctcatagctatctttgcctggcttatcaacatccatatcatggtgcgtatgcttaatcagccctggacggatccctctggcgcataatgccgggatcagttttttcaaaagcgtagtttttccggtaccactccacgcggcaaaggcgagtaacggtatcatcgtttttcctgccatcgggcaagctcctctggcgtattcacgttaacaaatgcatctttatgatcgctgaaatcaaccgcatgaccgccagccagacgcataaataccattacccggcgttctcctgcttgcagatattccagtaataaaggctcaatagcgcggtttaccagagcaatagtcgggtgatcgcgttcaccgtcatggacccacacgacaggcgcatctttgcgctgatgattaagcctggctgctaaatcagggggaatgtaaggcgtatcgcacgggcaaaacaaaaaccactcaccagcttcctgctgcattacactaagcattcctgccagagggcctgggtaatccgccagactatcttcaatcactttcagaccgcttgcctgatagatttcctgatgacgattagcattaaccacgacgtgagagagctgcgtcataagcgcgtcagcgacatgttgccataatggtttgccgtttaattcaagcaatcctttatctacgccgcccattcgtctggctttaccgcctgccagcacaacgcctgttatcgtcgtcatcagattcaccgatatcgcctcttttattgtgggattgaccctgctaacgtgtctgtctcaagagtaaggagcatcactatgaaatgtaaacgtctgaatgaagttattgaactcctccagccagcctggcaaaaagagccagaccttaacctgctgcaatttttgcagaaactggcgaaagagagtggttttgacggcgaactggcggatttgacggatgacattctgatctatcacctgaaaatgcgtgattccgcgaaagatgcggtgatcccgggtttgcagaaagattatgaagaagacttcaaaacggcgctgttacgcgctcgcggcgtaattaaagagtaaaagcttgtaagcggcgccaccaaaatcatcgtgaaatgatatccttcgtcattcgtaatgttttccggatgatgggatgaataacagcgcttttactttccagacactacacccggataccatcatggacgctctgtttgagcatgggatccgggtggattccggtcttaccccgcttaacagctatgaaaaccgtgtctatcaatttcaggacgaagatcgtcgacgttttgtcgtcaaattttatcgccctgaacgttggacagccgatcaaatcctcgaagaacatcaatttgcgttgcagctggtaaatgatgaagttccggtcgcagcacctgtggcctttaacggtcagactttattgaatcatcagggattttatttcgctgtttttccaagcgtcggtggtcgccagttcgaagctgataatatcgatcagatggaagcggttgggcgttatttagggcgtatgcaccagacggggcgcaaacagctttttatccatcgcccgaccatcggtttgaacgaatatctcattgagccacgcaagctgtttgaggacgctacactgataccttccgggttgaaagcggcattcctgaaagcgacagatgagctgattgccgccgttacagcacactggcgggaagatttcaccgttctgcggctacatggagactgccacgccgggaatattctctggcgcgatggtccaatgtttgttgatctggatgatgcacgtaatggtccagccgttcaggatttgtggatgttgctcaatggcgataaagccgagcagcggatgcaactggaaactattattgaagcttatgaagaatttagcgagttcgacaccgctgaaatcggactgattgaacctttacgcgccatgcgtttggtttattatcttgcctggctaatgcggcgttgggctgatcccgcgttcccgaaaaatttcccgtggttaaccggggaagattactggctgcgacagacggcgacttttatagaacaggcaaaagttctacaagaaccccctttgcaattaacacctatgtattaatcggagagagtagatcatgaaaaagatttggctggcgctggctggtttagttttagcgtttagcgcaagcgcggcgcagtatgaagatggtaaacagtacactaccctggaaaaaccggtagctggcgcgccgcaagtgctggagtttttctctttcttctgcccgcactgctatcagtttgaagaagttctgcatatttctgataatgtgaagaaaaaactgccggaaggcgtgaagatgactaaataccacgtcaacttcatgggtggtgacctgggcaaagatctgactcaggcatgggctgtggcgatggcgctgggcgtggaagacaaagtgactgttccgctgtttgaaggcgtacagaaaacccagaccattcgttctgcttctgatatccgcgatgtatttatcaacgcaggtattaaaggtgaagagtacgacgcggcgtggaacagcttcgtggtgaaatctctggtcgctcagcaggaaaaagctgcagctgacgtgcaattgcgtggcgttccggcgatgtttgttaacggtaaatatcagctgaatccgcagggtatggataccagcaatatggatgtttttgttcagcagtatgctgatacagtgaaatatctgtccgagaaaaaataattcaatgtaaattacataaagcccgtgaatattcacgggctttttttattatttaataaatataaatacattctgataatgcatcctgccgctggacattatttcagcataagtggatattcaaagttttgctgttttatcagggaatatttatatgatacgtaagagtgctacaggtgttattgttgcgttagccgtaatctggggtggtggcacatggtacacaggtacgcaaattcagcctggtgtcgaaaaatttattaaagattttaacgatgctaaaaagaaaggtgaacatgcctacgatatgacgttaagttatcaaaattttgacaaaggcttttttaattcccgttttcaaatgcaaatgacattcgataacggtgcacccgatctcaatatcaagccaggccagaaagttgtatttgatgtggatgttgagcacggtccgttgcccatcacaatgttaatgcatggtaatgtcatcccagcactggcagcggcaaaagtgaacttagtgaataatgaactgacacaaccgctatttatcgccgcgaaaaataaaagccccgtggaagcgacattgcgattcgcgtttggtggcagtttctctacgacattagatgttgcccctgcagagtatggaaagttttcttttggtgagggccagtttacttttaatggtgatggtagtagtttgtctaacctggatattgaaggcaaagtcgaagatattgttctgcaattaagtccaatgaacaaagtaacggcaaaaagttttaccattgattctctggcgcgattagaagaaaagaaatttccggttggtgaaagcgagagcaaatttaatcagattaacattatcaatcacggggaagacgttgcccaaatcgatgctttcgttgcaaaaaccaggctggatcgcgttaaagacaaagattatatcaatgtcaatctcacctacgaacttgataagttaacaaaagggaatcagcaactcggtagtggtgagtggagtttgattgctgaatctattgatcccagtgcagtgcgccaatttatcatccagtataacattgcgatgcagaagcagcttgctgcacaccctgagttagcaaacgatgaagttgctctgcaagaagtgaatgctgcattgttcaaagagtatttaccgttattacaaaaaagtgagccgaccattaaacaaccggtaagatggaagaacgcactcggcgaactaaatgccaatctggatatcagtattgccgacccagccaaatctagtagttccacaaacaaagatatcaaaagcctcaattttgatgtgaagttaccgcttaatgtcgtcacagaaaccgcaaaacagcttaatttatctgaaggaatggatgcggaaaaagcgcaaaagcaggctgataaacaaatcagcgggatgatgacattaggtcagatgtttcagttaatcacgattgacaacaataccgccagcctgcagctgcgttatacaccgggtaaagttgtttttaacggacaggagatgagcgaagaagaatttatgtctcgtgccggacgttttgttcattaaaatactcactcgcctctgctcattcagaggcgagtaaaacttacttattctgacgctgactactcatgagagacgtcagaagccggtctttttcctgccacaaactgttcagccattgctgaaaatggcgcttaaagcttttgtcattgatgtagtcgccatgtaactcatcggcaataggctgtaaatccacatgtacgacaatccgcgtcagtttaccgcttaacatatcgaagaacggctgacggttattgtccggataacacagcgtaacattaagcagtttatcgaattgtttacccagtacatttagcgccatcgcaatgcctgccgcctttggtggcaacaagttttgaaaagtggagtgggtttgctgatgtttttcttgcgtgaaacgggagccttcaacgaaattgacaatggtggtgggatgcaggcgaaacttttcacaagaacgccgagtggtttcaacatctttaccacgtcgctccggatgacgtaataaataagcgcgggaataacgcttcataaacggcatatccaggctccagcacgccaggccaagaaatggcacccaggccagctgttgcttgaggaaatatttattcatcggaatgtgcttacgaaacagcacgcacagtacgacaatatctgcccaactacggtggttacaaataagcagataccagttcttcttacttaacccttccagcccgtgaacttcccattgaaggtgtgggttcagatgcagtaataccgccagaccttcacaccagcaatacatcataaaatcacaaaaacggctaacctttcgccaaatgactggcacaggtagcaatagttttacaatcccggcaatgatgatcgggacggaacaaaaaatagtgaccaaaatggtcaatacgatactcagcaaaagggttatcgcagcgagtattctcgtcataatgaatttattcaaaaggttagccatagacagtgcgctaaagaagcgcaaggcgcagattttagcagaaaacgacccaaataacggatgatccttaaggagaaaaataattcatatctatccacattagaaaaaatcccattatctcaattattagggatggatttatttttaactgcatgaaaaacaaagacaaacatcatgctgtaaaaagcatgataataaattaaaagcgatgtaaataatttatgcacaaagttatccacatgacgatttgcgagcgatccagaagatctacaaaagattttcacgaaaagcggtgaaaaactcatgttttcatcctgtctgtggcatcctttacccataatctgataaacaggcacggacattatggttcagatcccccaaaatccacttatccttgtagatggtagttcttatctttatcgcgcatatcacgcgtttcccccgctgactaacagcgcaggcgagccgaccggtgcgatgtatggtgtcctcaacatgctgcgcagtctgatcatgcaatataaaccgacgcatgcagcggtggtctttgacgccaagggaaaaacctttcgtgatgaactgtttgaacattacaaaagtcatcgcccgccaatgccggacgatctgcgtgcacaaatcgaacccttgcacgcgatggttaaagcgatgggactgccgctgctggcggtttctggcgtagaagcggacgacgttatcggtactctggcgcgcgaagccgaaaaagccgggcgtccggtgctgatcagcactggcgataaagatatggcgcagctggtgacgccaaatattacgcttatcaataccatgacgaataccatcctcggaccggaagaggtggtgaataagtacggcgtgccgccagaactgatcatcgatttcctggcgctgatgggtgactcctctgataacattcctggcgtaccgggcgtcggtgaaaaaaccgcgcaggcattgctgcaaggtcttggcggactggatacgctgtatgccgagccagaaaaaattgctgggttgagcttccgtggcgcgaaaacaatggcagcgaagctcgagcaaaacaaagaagttgcttatctcagttaccagctggcgacgattaaaaccgacgttgaactggagctgacctgtgaacaactggaagtgcagcaaccggcagcggaagagttgttggggctgttcaaaaagtatgagttcaaacgctggactgctgatgtcgaagcgggcaaatggttacaggccaaaggggcaaaaccagccgcgaagccacaggaaaccagtgttgcagacgaagcaccagaagtgacggcaacggtgatttcttatgacaactacgtcaccatccttgatgaagaaacactgaaagcgtggattgcgaagctggaaaaagcgccggtatttgcatttgataccgaaaccgacagccttgataacatctctgctaacctggtcgggctttcttttgctatcgagccaggcgtagcggcatatattccggttgctcatgattatcttgatgcgcccgatcaaatctctcgcgagcgtgcactcgagttgctaaaaccgctgctggaagatgaaaaggcgctgaaggtcgggcaaaacctgaaatacgatcgcggtattctggcgaactacggcattgaactgcgtgggattgcgtttgataccatgctggagtcctacattctcaatagcgttgccgggcgtcacgatatggacagcctcgcggaacgttggttgaagcacaaaaccatcacttttgaagagattgctggtaaaggcaaaaatcaactgacctttaaccagattgccctcgaagaagccggacgttacgccgccgaagatgcagatgtcaccttgcagttgcatctgaaaatgtggccggatctgcaaaaacacaaagggccgttgaacgtcttcgagaatatcgaaatgccgctggtgccggtgcttagtcgcattgaacgtaacggtgtgaagatcgatccgaaagtgctgcacaatcattctgaagagctcacccttcgtctggctgagctggaaaagaaagcgcatgaaattgcaggtgaggaatttaacctttcttccaccaagcagttacaaaccattctctttgaaaaacagggcattaaaccgctgaagaaaacgccgggtggcgcgccgagtacgagcgaagaggtactggaagaactggcgctggactatccgttgccaaaagtgattctggagtatcgtggtctggcgaagctgaaaagcacctacaccgacaagctgccgctgatgatcaacccgaaaaccgggcgtgtgcatacctcttatcaccaggcagtaactgcaacgggacgtttaagcagtaccgatcctaacctgcaaaacattccggtgcgtaacgaagaaggtcgtcgtatccgccaggcgtttattgcgccagaggattatgtgattgtcagtgcggactacagccagattgaactgcgcattatggcgcatcttagccgtgacaaaggcttgctgaccgcattcgcggaaggaaaagatatccaccgggcaacggcggcagaagtgtttggtttgccactggaaaccgtcaccagcgagcaacgccgtagcgcgaaagcgatcaactttggtctgatttatggcatgagtgctttcggtctggcgcggcaattgaacattccacgtaaagaagcgcagaagtacatggacctttacttcgaacgctaccctggcgtgctggagtatatggaacgcacccgtgctcaggcgaaagagcagggctacgttgaaacgctggacggacgccgtctgtatctgccggatatcaaatccagcaatggtgctcgtcgtgcagcggctgaacgtgcagccattaacgcgccaatgcagggaaccgccgccgacattatcaaacgggcgatgattgccgttgatgcgtggttacaggctgagcaaccgcgtgtacgtatgatcatgcaggtacacgatgaactggtatttgaagttcataaagatgatgttgatgccgtcgcgaagcagattcatcaactgatggaaaactgtacccgtctggatgtgccgttgctggtggaagtggggagtggcgaaaactgggatcaggcgcactaagattcgcctgaacatgccttttttcgtaagtaagcaacataagctgtcacgttttgtgatggctattagaaattcctatgcaacaactgaaaaaaaattacaaaaagtgctttctgaactgaacaaaaaagagtaaagttagtcgcgtagggtacagaggtaagatgttctatctttcagaccttttacttcacgtaatcggatttggctgaatattttagccgccccagtcagtaatgactggggcgttttttattgggcgaaagaaaagatccgtaatgcctgatgcgctatgtttatcaggccaacggtagaattgtaatctattgaatttacgggccggatacgccacatccggcacaagcattaaggcaagaaaattattcgccgtcctgcgtttcttctacaggctgcatctcgctaaaccaggtatccagtttctgccgcagcttgtccacgccttgtttcttcaagctagaaaacgtttcaacctgcacatcaccgttaaacgccagtacagcttcacgcaccatattcaattgcgctttacgtgcgccgcttgccagtttgtccgctttggtcagcagcaccagaacggcgatattgctgtctaccgcccactcaatcatctgctgatccaaatctttcagcggatggcgaatatccattagcaccaccagaccttgcaggctctgacgtttttcgaggtattcgccgagcgcacgctgccatttgcgcttcatctcttccgggacttccgcataaccgtacccaggcaagtcaaccagacgcttgccgtcagccacttcaaacaggttgataagctgggtgcgccctggggttttactggtacgagccaggcttttctggttagtcagcgtgttcagcgcgctggatttacctgcgttggaacggcctgcaaaagccacttcaattccggtatcggaaggtaggtggcgaatatcaggcgcactcatcacaaaatgcgtctgttgataattcaaattagtcaaagcggtcgtctccgtcagtcaaagctttgtggcgattatacctgaaccataataaaaggcggatttttcggcgtgagcgttgtaagtaaaagccatacgctttgtgagacattgccgatagtctttatgcgaaatagcagagaaaattctgcgatgcatgtcaaataagctatataaatcagtgaattgcttttatataaaactctgaaaatgtgcaaatactgatggcggttgattgtttgtttaaagcaaaggcgtaaagtagcacccatagagcgaggacgctaacaggaacaatgactcaggatgagggtcaggagcgccaggaggcgaagacagaggattgtcaggaagacaaacgtccggagacgtaattaaacggaaatggaatcaacacggattgttccggctaaaggaaaaacagggtgtgttggcggcctgcaaggattgtaagacccgttaagggttatgagtcaggaaaaaaggcgacagagtaatctgtcgccttttttctttgcttgctttctgttagattccgccgcaaatctatactgaataaaacggctaaaagacgaaccattatgaaaccaagttctagtaacagtcgcagcaaaggtcatgcaaaagcgcgtcgaaaaacacgcgaggagctggatcaggaagctcgtgatcgcaagcgtcagaaaaaacgtcgtggtcatgcgccgggcagccgcgcagcgggcggaaacaccacgagtggcagcaaaggccagaacgcaccaaaagatccacgtattggcagtaaaacccctattccattgggcgtgactgaaaaagtcaccaaacagcacaaaccgaagagtgagaaacctatgcttagtccgcaggcggagttggaattactggaaacggatgagcgtctggatgcgctgctggaacgtctggaagcaggcgaaaccctgagtgccgaagagcaatcctgggtggatgctaaactggatcgtattgatgagttgatgcagaaactcggcctctcttatgacgatgacgaagaagaggaagaagacgagaagcaagaagacatgatgcgtctgctgcggggcaactaacggattgccgccgtgggccttcccgttctgctgataacccttccggttatatgttatctggtgtggttattcgttaaactacagcggttgtcgcggcgacaaaagtggctgcgcaaccggctgatgacccgaaacgggcatccgccggtacgccgtagccgccagagacgccatcggaaggagtgagcatgtctgtacagcaaatcgactgggatctggccctgatccagaaatataactattccgggccacgatacaccagctacccgaccgcgctggagtttagtgaagacttcggcgaacaggcgtttttacaagccgtggcgcgctatcctgagcgtccattatctctctacgtacatatcccgttctgccataagctttgttacttctgcggttgcaataagattgttactcgccagcagcacaaggccgatcagtatctggacgcgctggagcaagaaatcgtccatcgtgcaccgctgttcgccgggcgtcacgtcagccaattgcactggggcggcggaacgccgacgtatctgaataaagcgcaaatcagccgcctgatgaagctgctgcgcgaaaacttccagttcaatgccgatgcggagattagcatcgaagtcgatccgcgggaaatcgaactggatgtactcgatcatttacgcgccgaaggctttaatcgcctgagcatgggcgtgcaggacttcaacaaagaagtgcaacgtctggttaaccgcgagcaggatgaagagttcatctttgcactgcttaaccatgcgcgtgagattggttttacctccaccaacatcgacctgatttacggcctgccgaaacagacgccggagagtttcgcctttaccctgaaacgtgtggcggagctgaaccccgatcgtctgagtgtctttaactacgcgcatctgccgaccatttttgctgctcagcgcaaaatcaaagatgctgacctgccgagtccgcagcaaaaactcgatatcctgcaggaaaccatcgccttcctgacgcaaagcggctatcagtttatcggtatggatcactttgcccgtccggatgacgagctggcggtggcccagcgtgaaggcgtgctgcatcgtaacttccagggctacaccactcagggcgataccgatctgctggggatgggcgtttccgccatcagcatgattggcgactgctacgcgcagaaccagaaagagttgaagcagtactatcagcaagtggatgaacaaggcaatgcgctgtggcgtggtattgcgctaacgcgtgatgactgtattcgccgcgatgtgattaagagcctcatctgcaacttccgtctggattacgcccctattgagaaacagtgggatttgcacttcgctgattactttgcggaagatctcaagctgctcgccccgttagcaaaagatgggctggtggatgtggatgagaagggaatacaggtgacggcgaaaggtcgcttgctgatccgcaacatttgcatgtgctttgatacctatctgcgccagaaagcgcggatgcagcagttctctcgggtgatttaaatagtgaatggcgcttcgtttacaaagtagaaaacgaaagcgccatcaatgtgctgagaacaagattgcctgatgcgctgggcaacaaaacctgttgaaattattgcttttgtaggccggataaggcgtttacgccgcatcaggcatctgagcatgatgcctgatgcggcgctggtcgcgtcttatcaggcctacgactttctccgcatccggcataaacaacgagcttcagctaaacagcccaatcattgcggcacacagcacggcagcaacggcagtttgcggtgtgtggctgtcaactgcgccactcgataccagattaattattgattccagcataatgactctccccgttttccgggcaagatcatactgaacttatcggaacagtaaagcgtaaaataccagcaatttgcgctcaataatcaatctttacacacaagctgtgaatcactccatccccagctcttttaacttacgcgtcagggtgttgcggccccagccgagtagccgcgccgcttcctgtttatgcccctgcgtatgtcgcaacgcggtcgtcagtaacgtccgctccagctctggctgcgcttcggaaagcagattttgatgaccggaacgcagcgctctgtctgcccactgcgcaagaagcgtcgcccagctgtccggttgcatttggctagtactctccgcaaccgtactttcaaacagttcgccgggcaaatcctgaatcaacacttcctgcccggcggccatcaccgttagccagcggcaggtgttttccagctggcgcacgttgcctggccacgccagacgcgtcagagcagcttcggtttccggatgcagtaacttcgcttctacgcccagttcgcgcgcggcaacctgtaaaaaatggcgcgccagacggggaatatcttcccgacgttcgcgcagcggcggcagatgaacgcggataacgttcaggcggtggaacagatcctcacggaacttaccttcctgcactcgctgttcgagattctggtgagtggcagcgataatccgcacatccactttcaccggcgcatagccgccaacgcggtaaaactgaccgtctgccagcacgcgcagcaaacgcgtctgcacatccagcggcatatcaccaatttcgtcgaggaataatgtaccgccatcggcctgttcaaaacgcccctgacgaatggtattcgcgccagtaaacgcgcctttctcgtggccaaacagttcactttcgatcaaatcttttgggatagctgccatattcagcgcgataaacggcgctttggcgcgcggactgtggcgatgcagggcatgagcgaccagttctttaccggtgccggattcgccgttaatcagcacgctaatagaagaacggctaagccgaccgataatacggaacacgtcctgcatggctggcgcttcgccgatgatatcggtcgttgggccgttaagctgaacattacgcggctgctgctgttcctggtaatgactgatagcgcgctcaaccagcgccactgcttcgtcgatatcaaacggtttgggcagataatcaaacgccccttgttgataggcgctgacggcagcatccagatcggaatgtgcggtcataatgatgaccggaagcattggatggcgctgtttaatctgcttgagcagcgccagcccgtccattcccggcatacggatatcactaagcagcacatccggcgttttgctcgccagcgcctccagcacttctgcgccgttctcaaacgtcgtacaggttaaacctgccccagcgagcgcacgttcaagcacccaacggatggaactatcgtcatcgactacccagactatccctcgttgcataaacgtcacctttatttcctgataggcaggtaaacgctgaactcggtatgccctggccaactggtaaattcaattttgccactatgctgatcaatcaaattacgagcgatggataagccaagcccggtgccaccttcgcggccgctgaccatcgggtaaaacagcgtatcctgcaaatgaggcggaatgcccggcccgttatcttccacatcaatccgcgccgccagccggtagcgctcgccgtgtaaggtcagttgaaacgcggtgcgggtacgcagaatgatttcaccgccttccggccccagcgcctgtagcgcattgcgcacaatattcagcaagacctgttcaatttgatccgggtcgtgcgccagttccggtaggctgggatcgtaatcacgaatcaaccgcacgttgtccggcagttccatgctcaccagcgttaccacgcgttcagccactttgtgaatactttcggtaacgcgcgtaccgggcagctgcggccccaacagacggtcgaccagatttcgcagccggtccgcctgttcgataatcactttggtatattcgagtagacttgggtcaggtaacgctttgctgagcagctgcgccgcgccacgtaaaccgccaagcggatttttaatctcatgtgccaggccgcgcactaaatcacgggcagcaacctgctgggcgtgctgtagctgttcctgacttaagcggcgctggttatccatcggagccatctccagcaggatcatgccgtccggcatacgctgggccgtcacagaaaggatatggctgcgcccgtcgatgaccagcgtcacttcgttatcggtaaaaccttgccccgcctccagactttcttgcatcagctcgatatttaaactgaagtagctcaacagttccggtaacggtgtaccaaacaatttgcgggagctttgggcgagcagttgttgcgcggcagggttggcgtaatggatcgccaggttgtcatcgattaacaaaatactgttaatcaggctgttgaggatctgcccagcatcgggctgcgtgcctgttgccataaagcagtctcctgaacaggttgcaccattttagtgcattatagctttttacggataaaaagcgcgaagcatcagagaattgacggagaaaaaagcccatgcagagatgggctacagatagctgacaaacttcacgttggagagcgactcacctgctccggcctaccacatcatcaccgtgtaggccggataagacgcatttgcgtcgcatccggcgtgatgtgcttgccaccgatcccaggcctgccagagacaggcgaaaagtttccacggcaactaaaacacttagacgctgtagtacagctcaaactctaccggatgcggagtcatacgcacgcggtcatcttcttcgcgacgcagagcgatgtacgcatcaattgcttcgtcagtgaacacgccaccggctttcaggaactcgcggtccagatccagttcgttcagtgcttcttccagagagcctgcaacctgtgggatctctttcgcttcttctggcggcaggtcatacaggtttttgtccatggcttcgcccggatggatcttgttcttgataccatcaagaccggccatcagcagggcagcaaagcacaggtacgggttagctgccggatccgggaaacgtacttcgatacgacgtgctttcggagaagaaaccaccggaatacggatagacgcagaacggttacgcgcagagtaagccagcattaccggtgcttcatagcccgggaccagacgcttataagagttggtggtcgggtttgccagggcgttaatcgctttagcgtgtttgattacgccgccaatgtagtacagcgcctgctcagacagacctgcgtatttgtcgcctgcgaacaggttaacgccgtttttagacagagacatgtggcagtgcataccggagccgttatcaccgaacatcggttttggcataaaggtcgcggttttaccgaagcggtgcgctacgttgtgcacaacatatttgtagatctgaatttcgtcagcttttttggtcatggtattgaagcgggtagccacttcgttctgaccagcagtcgctacttcgtggtgatgggcttcaaccaccagacccatctgttccatcaccagacacatttcagaacgaatatcctgagcgctgtctaccggtggaaccgggaagtaaccgcctttcactgccggacggtgacctttgttaccaccttcgtattgggtggaggagttccatgcgccttcgatatcgtcgatagcaacgtgggaaccggagatagaacttccgaaacggatgtcatcgaacaggaagaattcaggttctggcccgaacagtacggtgtcggcaatgccagtggaacgcaggtaatcttcggcgcgcttcgcaatggagcgcgggtcacggtcatagccttgcagggtgccaggttcaaggatgtcgcaacggataatcagggtggagtcggcgaagaacgggtcaatcactgcggtggatgcgtctggcatcagcaccatgtcggactcgttaatgcctttccagccgccaatgctggagccgtcaaacattttgccttcttcgaagaattcagcattcacctgatgagcagggatagtgacgtgctgttctttacctttagtatcggtgaagcgcaaatcaacaaacttcacttcgtgctcgttcagcatcgtcagtacgtgttcagcggacatactttaactctcctggattggtcatggtcgtcgtggtaacgaaatctgcaattattttggccgtgtcgccgtaaaaaagataaagcgaaatctgtgccaacttttaaattgcccctaaaaggcgttatcatgcgcaccatcgtgcaaaagggctgcaccacgatgtgaatgttgcaccaatatagtgcttcaatggaaacattaagcaccatgttggtgcaatgacctttggataaccctttttatgctccgtgaaagcgatcacaaagggactctgcaatacttgtttgcggaggatgtttgtgatcctgttttgtagtgcgattaatccgtgtacaataacgcgctatttctaatgcctgaggcaaagttgtgatcgaaaaattgcgtaatatcgccatcatcgcgcacgtagaccatggtaaaaccaccctggtagacaagctgctccaacaatccggtacgttcgactctcgtgccgaaacccaagagcgcgtgatggactccaacgatttggagaaagagcgtgggattaccatcctcgcgaaaaacaccgctatcaaatggaatgattaccgtatcaacatcgttgataccccggggcacgccgacttcggtggtgaagttgaacgtgtaatgtccatggtagacagtgtgctgctggtggttgacgcatttgacggcccgatgccgcaaacgcgcttcgtaaccaaaaaagcgtttgcttacggcctgaagccgattgttgttatcaacaaagttgaccgccctggcgcgcgtcctgattgggttgtggatcaggtattcgatctgttcgttaacctcgacgcgaccgacgagcagctggacttcccgatcgtttacgcttctgcgctgaacggtatcgcgggtctggaccacgaagatatggcggaagacatgaccccgctgtaccaggcgattgttgaccacgttcctgcgccggacgttgaccttgacggtccgttccagatgcagatttctcagctcgattacaacagctatgttggcgttatcggcattggccgcatcaagcgcggtaaagtgaagccgaaccagcaggtcactatcatcgatagcgaaggcaaaacccgcaacgcgaaagtcggtaaagtgctgggccacctcggtctggaacgtatcgaaaccgatctggcggaagctggcgatatcgttgcgatcacgggccttggcgaactgaacatttctgacaccgtttgcgacacgcaaaacgttgaagcgctgccggcactctccgttgatgagccgaccgtttctatgttcttctgcgttaacaccagcccgttctgcggtaaagaaggtaagttcgtaacgtctcgtcagatcctggatcgtctgaacaaagaactggtacacaacgttgcgctgcgcgtagaagaaaccgaagacgccgatgcgttccgcgtttctggtcgtggcgaactgcacctgtctgttctgatcgaaaacatgcgtcgtgaaggtttcgaactggcggtatcccgtccgaaagttatcttccgtgaaatcgacggtcgtaaacaagagccgtatgaaaacgtgactctggacgttgaagaacagcatcagggttctgtaatgcaggcgctgggcgaacgtaaaggcgacctgaaaaacatgaatccagacggtaaaggccgcgtacgtctcgactacgtgatcccaagccgtggtctgattggcttccgttctgagttcatgaccatgacttccggtactggtctgctgtactccaccttcagccactacgacgacgtacgtccgggtgaagtgggtcagcgtcagaacggcgtactgatctctaacggtcagggtaaagcggtcgcgttcgcgctgttcggtctgcaggatcgcggtaagctgttcctcggtcacggtgcagaagtttacgaaggtcagattatcggtattcatagccgctctaacgacctgactgtaaactgcctgaccggtaagaaactgaccaacatgcgtgcttccggtactgacgaagccgttgttctggttccgcctatccgcatgactctggaacaagctctggagttcatcgatgatgacgaactggtagaagtgactccgacctctatccgtattcgtaaacgtcacctgacggaaaacgatcgtcgccgcgccaaccgcgcaccgaaagacgattaatttcgttttttagtcataaaaaacctgccagcgatggcaggtttttttttgcctgtcgtgagcgcacaccaatgcgagtatctcccttataagtctgtggttacgtcaatagagagctttgtcacaattatctgcaaagtcatacgccgttaattgctttcttttttggcgtaagcgtaagatgcttcatctggtttaaaccaaaaggattaaacaatggcggagaatcaatccaccgtagaaaatgcaaaagagaaactggatcggtggttgaaagatggcatcaccacgccgggtggaaaactccctagtgaaagagagctgggagaactgctgggcattaaacgtatgacgctgcgccaggcgttgttgaacctcgaggcagaatccaaaatcttccgtaaggatcgtaaggggtggttcgtgacccagccgcgatttaattacagtccggagctgagcgcgagctttcagcgggccgcaattgagcaagggcgagagccttcctgggggtttaccgagaaaaaccgtaccagcgatattcccgagacgctcgcgccactgattgcagtgacgccaagtactgaactctatcgcatcaccggctggggggcgctggaaggacataaagttttctatcacgaaacatatattaatcctgaagttgctccgggctttattgaacaacttgaaaaccacagtttttctgcagtctgggaaaagtgctaccaaaaagagacggtagtaaaaaaattgattttcaaacccgtcagaatgccgggcgatatcagcaagtatcttggcggttctgcgggtatgccagcgatcttaattgaaaagcatcgcgccgaccagcaaggcaatattgtccaaatagatattgaatattggcgatttgaggccgtagacctcatcattaatctgtaagtgttttatggtgacaataaataacgcaagaaagattctacaacgtgtcgacactcttcctctttatttacatgcttatgcctttcatttaaatatgcggctggaaagagtgttgcctgctgatttacttgatatcgcaagtgaaaataatctacgtggcgtcaaaatccatgttctcgatggcgagcgtttttctcttggtaatatggacgataaagaactctctgcctttggggataaagcccgccgtctgaaccttgatattcatattgaaaccagcgccagtgataaggcatctattgacgaagccgtcgccatcgcgttgaaaactggggcaagctccgtacgtttttatccacgttatgaaggtaatttgcgcgacgtattaagcattatcgctaacgacattgcctatgtacgggaaacgtatcaggacagcggcctgacttttacgatcgagcagcatgaagatttaaaaagtcatgagctggtgagcctggtcaaagaaagtgagatggaatctctttccttactgtttgattttgcgaacatgatcaatgcaaatgagcatcccatcgacgctttaaaaacgatggcaccgcatattacccaggtccatatcaaagatgccttgatcgttaaagaaccgggtggcctgggtcataaagcctgtattagtggtcagggtgatatgccgttcaaagcgttattaacgcaccttatctgcctgggtgatgatgagccgcaggtgacggcatatggcctggaagaagaggttgattactatgcgccggcgttccgctttgaagacgaagatgataatccgtggatcccttatcgccagatgagtgaaacaccattgccagaaaatcatttactggatgcgcggttacgtaaagaaaaagaagatgcaattaatcagataaatcatgtgcgtaacgtactacaacaaatcaaacaagaggcaaaccatcttctgaaccactaataagttttaactcatacgcagttaataaaaccattccatatgaatggtcggtatcttattgcctttaaaacagtgattttaaaaatcgcttaggggatgttatgctcacgaaaaagaaatgggcgttatttagtctattaacactgtgtggcggtacaatttataaattaccgagcctgaaagatgcgttttatatcccgatgcaggaatatttccatttgaccaatggtcaaattggtaatgctatgagcgtaaacagttttgtcaccacagtgggcttttttctgtctatttattttgccgataaactaccgcgcagatacaccatgagtttcagtctcattgcgacaggattactgggtgtttatttgacgacaatgccggggtattggggcatcctctttgtctgggcgctatttggcgttacttgcgacatgatgaactggccggtcttgctcaagagcgtaagtcgattgggcaatagcgaacaacaaggtcggttgtttggcttcttcgaaacagggcgtggcattgtcgataccgtggtggcattttctgcgttggcagtatttacctggtttggcagtggcttattaggttttaaagcaggcatctggttctattcccttattgtgattgccgtaggcattattattttctttgtcctgaatgacaaagaagaggcaccgtccgttgaggtgaaaaaagaagacggagcaagcaaaaacaccagtatgaccagcgtgctgaaagacaaaactatctggcttatcgcttttaacgtcttcttcgtttacgcggtttactgtggcctgacattcttcattccattcctgaaaaacatctatctattgcccgttgcgctggtgggggcttacggcatcattaaccaatactgtctgaaaatgattggtggaccgattggtggcatgattagtgataagatcctgaaaagcccaagtaaatatctatgctacacctttatcattagtaccgctgcgctcgtactgttgattatgctgccgcacgaaagtatgccggtctatttagggatggcatgtacgctgggctttggcgcgatagtctttacacagcgagccgtattttttgcacctatcggcgaagcaaaaattgctgaaaataaaacaggtgcggcgatggcgttgggtagctttattggttacgctccggcgatgttctgcttcagtctgtatggctacattctggatttaaatccggggattattggctacaaaatcgtgtttggcattatggcctgcttcgcattcagtggtgcggtggtttccgtaatgctggttaagcgtattagccaacgtaagaaagagatgctggcggctgaagcttaattaatggccggatgtgcttaatccggccaacgaaaaccgtatcaaccgtaggccggataaggcgtttacgccgcatccggcagtttcacatcagaagaaatacttcgtcccgatacggatctggttttgctcgcggtggtacggttcgacgttgcggtctaaccagcgcaattcgaaataagggagccagtgttcattaatacggtaacggaaggtgttagtgatttcccaatgatgatctttcccgttgctactattaaagtcattcactcgcatgaagtaatgtggctcaaatgtataggaaaatttatcggtgattttaaaattccagtaggtgccaatttcataggtgtcattattatccagttccccgctcaaatctgtactactatagttattatggttatagcgatttcgtactgtcagattaaaccatggtacaaatttatagttgacgtccagatacactgcaccaccgctaccgatactcttatcattaattaagccaccgggctggatggttaatttatcggttggtttaaataacggataccagccttcaatttcgttatatccatgttttagttcatcttctcgctgaaagttgtaggtattggttaacataatacccgcgcccatatcgaagttataacccacacgtagcataacctcgccctgatcggaggcaagattatatgcctccctgttttcgacgtatgcgccagcaaatacgctggcagaggtcagagaagataataaaattattgcattaatctttttcataataagtccattttttaaacgtagggaggccgccacccaccaggatggaaatagcggctattgacatttataacgttacggaagccgttttttcttctgtcgccatctctttatttttgcgttggttgatttcctcaataatcaatgcaaaccgtttttcattgagtgtgtaaaagaatcccatcgtcaatgcagcaataattgccagtgcacaaggccagataaaaatgagctgacgcaaaccctgtaatgtcgcatcgctttgcgcgatgttgggaacataaccaatttgcgtcagcataatgcctggcaagaagccagcaagtgcggcagaaattttacgaaagaaggtataaccggtataaacagaaccttcggcacgaataccggttttccattcaccgtaatctacggtatctggtaccagtgcccagttcaggctgtttacaaaggccgtgccaaaaaaggcgacacaagagaacatgacgaaagtgaaagagttacttccccagaaataattcagtatatcacccaccgcccacagcaccatgccagccagataaacctgttttttaccaaaacattttacagttaatggcaccagtaatacgccgatgaggatgcatcccatactgaagaatcccatccagctcaataaattaatatcattcagcacatactgggtgtaatagacctgaatcgccagtttgatattaaatgccgccagggtacacaagttagcaatgcataaaaccagcaatggcggattccgaaatatcgcgcaaaaacttttgagaatactggctttatgtccggttggcgttgtgtccacataatgctctttgacgcctctgtagcacagcatcataaaaataaagccgccaatggagaacataagtgccgcacaggcataaccgacggtactgtcagaaaaaaggctctgcaacggaataaacgccacggtacaaatcaatagccctatggttgcaccaccctggcggtaagccgcgagctgcgcgcgctcattcgggtttttggtaattgccgggatcatcgcaccatagctgcagttcatcagactgtaactaagtccaaacatcataaacagcgcggtggcaatcgtcgttttaaccggcaaacaaaaggtggtggcgataaactggagcgttgcaattaacgccgccggaaccgctgcatataaaataaagggacgaaatttgcctttaggcccaatatttttccggctgtcgagtaaaaatccggtgagcatatcggtaaacgcggtaaaaaacttcgccaccagaaagataatcccgccatagtaagcaggcatccctaattcatcggtataaaatttgaggagatacagagtaccgatgcagagcattaaattgctaccgacgtcgcccataccataggcgattttttcccgcagattcagttttaatgtcagtggattatggtcagacataatcactccttataacgccccgcagggcgtcgtttattattattacgccgtgcgtttacgggcttctatctcttccacaatgcggacatacatcttctcgttcaggctgtagaagcaacccatcgccacaatggtgactaccgccagtgcgcttgggtagatgaagatcaactggcgtaacccttcaatggtgtggtcagcctgtgcgacgttcggcacatagccaatttgcgtcagcatccagccggggaagaaaccagccagcgcctgagacactttgcgaaagaaggtaaaaccggtgtagaccgttccttcgctacgcacgccggtgcgccactcgccgtactcgacggtgtcggaaaccagcgcccagttcaggctgttaacaaacgcactgccaaagaacgccaggcaggagaacgccacgaagctgacgctaccgccgccgaagaaatagttgagcagatcgcccagcacccaaatcagcaggccgccgatataaactttcttcttgccaaaacgtctgacactggcaggcatcaggaatacgccgatgaaaatacagcccatgctgaaaaatcccatatagctcaacaggatgggatcgttaagcacgtactgggtgtaatagacctggatggcgagcttgacgttaaacgcccctaaagtgcagaggttggcaatgcacagaatgaacagcgggcggttacccgcaattgcgcggaaagattgcagcaggcccggcttttgcgccggattagcaggctgggtttcgacataacgctctttcacgccgctgtagcagatccacataaacagcaggccaaacagactaaacagcgtggcggcgaagatatagccaagttgctgattaccttcgataagattcataactggcacgaatcccaccgtgcacagcagcaggcccagcgtagcgccgccctgacgccatgccgccagactggcgcgttcgttggggtttttggtgatagcgggaaccattgcgccgtaggagcagttcatcatgctgaaaaacagtccgtaaagcataaacagaatagtggccatcaccgttttaccggtgacatcaaacggtgtgccgacaaagttggcgatcgccagtaaggtgaccgggaaactcgcatacagaataaaaggacggaacttaccttttggaccgatcttgcgtcgggaatccaacataatgccggtacccatatcggtaaacgcagtaaagaatttactaatcaaaaagataatgccgccataggtgcctggcagccccagaacgtcggtataaaacttcaaaagataaagcgtaccgatatccagcaggatgttagaggccaggtcgccaataccgtaagagagtttctctttaaagggcaggcgtaaagttgctggatcttccgttgtgatgtgactcatgcttgttctccctttgcccatgagtttccccacgggcggatgtgattagatgctttttaagctcgcgaacagtgccgcccattcgctatcggcgcgataaaagaccggcggcttgccgatgggcgcattaacggtaacttccccgccccggaacgcttcacccgtccaggcgtggacccagttatcctccggcagatagagcgtccagtcgctacggccttcttcatgcaccggagcgaccagaatgtcgcgacctaacaggtactgatatttcagggtgtaagtgtgcgcatcgtcttcgtaatgcaggaacagcgggcgcataaccggcaggccggacttcgcattcagcgcgacggcctctttcaggtaaggtttcagggtggtgaagacggtggtcatacgggcgaaatgggcgatggtttctgcgtcgccgtcaaactgccagttgtcgccaggacggttaccttcgtgggtgcgcatcatcggcgtgaaggcgctgaaatcgcaccagcgcagcagcagctctttgctgcgcttcatctcaaacagggtggtgtaaccgccaatgtcgctgtggtgcaggccatgtccggtcattgccaggctcagcgccgccgggacaacgctcgccaggccatcgtcgagactccagtcgacgttctggtcgcccgcccacatcatggtggagtatttctggctaccggtagaaccggcgcgcataaagaaaaggatctcgccgagcttgcccgtttcttcaagggcttcgtagttacacttcgcccacagcgcaggccaggcgttatgcataatttcggcactgacgccgttatgcaagtacgtgtcggtgggcagatactcgccgaagtcagccatccagccgccgcagccgagttcaatcatgttctttttgatcacttccttgaaccaggcgtaggcttctggattagtgagatcgacaacgccgccgtaaaactcgccaaactccaccagatagtcaccgccagaggcatcttttgccagatagccgtgttgtgccgcttcttcgcagagatctttatcgctggcaacatacgggttgatataggccaggaactgcacgccctcctgattccactgcttaatgcgactatccagttgcgggtagttttcgctgttccacttccagttccacatcacgcgtttgccaaaagaggtcatacgaataccggaccagtcctgcgcccagatgccgttgaccttcacgcccgcgttacgcatggtgtccagtttcttctggcacacttccgtcccgccctgaatgccgagcgttactccgtcataaatccagtcgggcagttctggctggcgtcccagcagggcggttaatttttccagcagggaaatgtatgtgtcagcacattcaaaacgcagcgttgctttgtcttcccacagcgccagttcatggtattccggggcactaaagtcgaagttcatatagcaactgttatcaacatggcagtaatacttctgcgtgctgacaaacgtaggctgtgggaagaaagtccagtaatagtcgccgcccgcattttctttgcagtcggcctgccaggtgacataggtttgtttgttgcgaccaacgccttgttcactggtccatagcgggaacggtttgccacgcagatcgaagtaggaaaactgttcgccgcagccgtagatatggtcctctggttgagcggcaaggcgcagccagatacggttgtggttaaggttgtcgttttgtagttccagcaataaacgcccctgatcgtcggcagagatattcagcgtggcgctaatgtcagaaccacggctgaaatgaattaaccaaccatccggactctggctgacgatggcgtcggtaagcgcaattttctcctgtagtttatctttaatgctgaaattaccgcggaacatatcgatatccgctataccactgccaatccataaacaaggattatctttgctatgggttaaaataagacgttgttgaaaatgtagggtaaaactgtcgttattctgatgaaattgaaaatctaataactgtggacgtggcgtatccataactaatctccatagagttgagaacgagattgttgccttcctgttattacaggcttatgtaaaatgattctcataaaactgatatataaaaactttacagaagctgagctgtttttaacttaataaattgaagatacataatgttgcctttagcgagtgaaatgttcttcaatgattttgactgctaatcaatacaagttattttctctgtccgtaaatattaaaaaacaggcggtgcggttttccactttccagtaataataagtcgataccactattaaaggcgttaggcgggcaactcataggttcaactgccagtccctgacgctgtaatttttcaccgctataaacctgcacccagagttgatcggaacaaaggcttacgctaagcgcctgctgtggatgggtaatggtcatttcccacaaatcattagcggttttaaaggtgtggtcgatttttgtcgcggctatttttttcgcctgcgtgaaatttaaatccagctcatcaacgtggtgaagcgttgtcggattcgcgtgctcatcgacggcataaacctggtttgccggaagctggaacagatattcatcaacagatgttaagttgcaggttaaataaggatgaatacccacgccataaggcgctgcgacagtgccgatattctggcttgcgatctcaacggaaagacccgtgtgtgcgttgaggctataaacaacttgactagccagcataaacggatagccgtaactgggcggcagaaaagctgtcagggtaacgctggtggcggttaattcactaatttgccagtctcgccaggcaagcagcccgtgaatagcggctttactactatgttcattaatgggtaactgatattcctgcccctgatagcggtaacagccgttggcgatccggttcggccacggaataagcactttacccagatgcgccagcggcatctcttcgggtttgtgcgggatgactaaatgacaaccctgaaaggttaattcagccagaccagcaccgacggtcacaatggtcgcgtgataatcccccgcggcaagactaacggtctgtccactgcaatgcatattggtgatttgcatacaaggcaccttaattaagctcatacagcctcccgtgaggctgatgtcaaacccaaaaactgcaccggacggtcccctcgcccctttggggagagggttagggagaggggaaaacccgcaccctattttcagatcagttatttcgcattaatatccagcagacccgctgcaaccgctggagccatgccgggcgctaacgggatacgcgggatcaccaggcaatgcagcaggtgataaatatcctgtttgccgtcccagactttggtggtgaccttattgtccgcatccagctcctgccaccaggaaccattttcatagtccatcaggtacttaatgcagtactcccaccatgtttgataccaggtttcatactggcgatcgccagtgacggtgtagagcgcgtaggccgtacccattgcttcgacgataggccaacgtacacgttcgcggaccaccggttttccttcccagtcaacggtataaacaatcccgtccgcgccatcgggtgcccaggcatcgcgcacggtggcgttaaacagacctttggcatcttctagcagccatgctggtggttgttcgcaacgggcttccagggcagcatggatgtgcagcattaaacggccccattcgatccagtggcctggtgtacctccgaacgcgcggaagcgatgcgccgggttatctttgttgtaatccggcagcggattccactgggtatcgaagtgttcgttaacgcgataatgattatttctggcgacgtcgtggataatcacggaagccacgcgaatcgcgcgatccagccattttttgtcgtgagtgacgtcataaacaatcaagaaagcttccaccgcgtgcatattggcattgccgccgcggtactcttcggttttgctgaaggcttcgtcccaggattccaggcacatctgctcttcttcgctccagaaatatttctcgataatttcaatggtgtaatcgagcagcttgcgcgcttccgggtgacccgttgtgacggcgctggcggcacccagcagagcaaagaagtgttgatagccctgtttggaggcatccaccacgccctcgtcattcacgcaggcataccagccgccatattttttatcacgcagtgcgccgttcatggctttgataccgtgatcaaccaagctgtaagcgccaggtcgacccatcgccgcagcaacggaataaacgtgcaacatacgagcggtgatccacagatgggtgcccatctcttctttgatttgccctttattgcctaaccagccaaaaccagtcggcactacggaatttttaccaaaatcaaagatgcggtcggtttcctgttccagccaacggttgtggcttagggtgttaaaccatttcattccttttatcctcatcttagcggcgtttagccatcatttcgtcgacgatatcgccaagttgttgtaatttcggtgcgcaaacgtcacgcagcatcagctcgttgtctggtaaaccgacgacgcttgcccagactgcacggcctgccaggaatccgcttgcgcccgccgtcattgccacgcgtacggcacgcgggaacagtttttcgtcgacaccggaagagaggatcacccatggcatattgatatggtcattcagacgttgactagcacagagaagctcttgttgcggacctttgccataaagcggcatttcaactttgtagaggtcagcgccactgtcgcccagctctttggcggcatcgatgatcgcttgttcgcgatcgaatttatcgccacgacgcggtgggcggacgactggctcaatgatgcttaccagaccgtgactgtggcacagttcgttgaactctttcaccatatccagacgttgctgcgcatcttcatcactacgccacagcaccagcagttttaaggctttgccaccgtcttgtttgatctgtagcggattgattttgcggtcaataaccacgctatcgaccggaataccgttgccaggaatgaactcatcggcggcgacaatcatggcgcaacttttggcaatcgcgttttgctcaaccacctggcggtagcagaattgttgatctaccagaatcgcgctggcataagggctgagggcctttgcagcgttaactttgaaatcagttaaaacgctatcggctaccggagcgggtgccccagccgcggcaaacatcatgcgcatggcttcgcgctgatcgaccgccagcatggcaaaaccgccgcttgcgcgcgtaatgtcgttgatggtgtacttattcattcatttattcctttatccagtcgttacatttttactttggcagtcatcccggcactgacacggacctgttccagaatggcggaccagtcctggcgaccgcgacccgctgcgcgcgcctggctataaacctcccgactggcggcccccagcggcattggcacatgcagctggttggcgacatcaagggcgatgccaagatccttatgggcaagatcgatcatgaaggcgggagaaagatctccgctgaggactttgtttggccaggaagtggtgaagtgacctttaccggcggcggtaccgctcatcactttgacggcaacatcgaagggaagattcagggcttcgcacaaaacggcggcttctgcgctaagcgcattgagcgcgatgctcatgtagttgttgatgagcttaacgcggatccccatgcccggaccgccagcgttgatcaactcactgcccatcgccatcaggatcggtgtggcacgttcaacttgttcagcggtgccgccagccagcagtaacagagtaccggtaatggcatttgcagaagtacggcctaccggaacatccatcatgctgaagcctttggcttgcatatcggcaatcaatttatcggtttgcagcggatggatggtggacatatcaatgaccagcgcatcggtagataagccttcgcaaacgccgttttcaccgaacaacacgttgcgcaccagatcgccattcggcaacatggtaatgataaattcggcatctttagcggcctgcgccgggttggcggcgggagtcgcacctttgtctaccagatgccgcacagcttcggcgttcacatcaaagacgcgaagttgatgcccttgctgcaataaattgctcgccattgggctacccatttgtcctaaaccgataaacgcgattgctgccataaccctctcctgaatacagttatgtcactttttgtcatttatgacatgctttgcttgtctgtttttgatcgtatttgtaatttatcgtcaaaaaattgacagccgtcactttttaaacaattggtgaaattaaaatgaacgcatcccaaaatgtttaaggaatgaccatgattcgtgttgcttgtgtaggtataaccgtgatggatcgcatctattacgtggaagggttaccgacggagagcggtaaatacgtggcgagaaattatacggaagttggtggcgggccagcggcgacggcagcggttgcggcggcaaggctgggggcgcaggtcgattttattggtcgcgtaggtgatgacgacacgggcaacagcctgctggcagagctggaatcctggggcgttaacacccgttacaccaaacggtataaccaggcgaaatctagccaatccgccatcatggtggataccaaaggcgagcggataatcattaactaccccagcccggatctgctgcctgacgcagagtggttggaggaaattgatttctctcagtgggatgttgtgctggcagatgtacgctggcacgacggcgctaaaaaagccttcaccctggcccgtcaggcgggtgtgatgaccgttctggacggggacattacgccgcaggatatcagtgagctggtggcattaagcgatcacgcggcctttagtgaaccgggtctggcgcgcttaacgggcgtgaaagagatggccagtgcgctaaaacaggcacaaacgctcacaaatggtcatgtctatgtgacccagggtagcgcaggctgcgactggctggaaaatggtgggcgtcagcatcaaccggccttcaaagttgatgtggtagataccacaggtgcgggtgatgtttttcacggcgctttggcggtggcgctggcaacaagtggggatttagcggagagtgtccgcttcgccagcggtgtagcggcgttaaaatgcacacgtcccggtggacgagccgggatccctgactgtgatcaaacccgatcttttttgagtctttttgtataaaatgccagggtgatggtttttcgaggaattttcatgagccttaccgaactaaccggtaacccgcggcacgaccaactcctcatgctgatcgccgagcgtgggtatatgaatattgatgagctggcaaatctgctggatgtctccacgcagacggtccgccgggatattcgtaaattaagcgagcaaggcctgattacgcgccatcacggtggcgcgggtcgggcttccagcgtcgttaatacggcgttcgagcagcgtgaggttagccaaaccgaggaaaaaaaagcgattgccgaagcggtggcagactatattcctgatggtagtacaatatttatcaccattggtacgactgttgagcatgttgcccgggcgttacttaaccataatcatttgcggataatcaccaacagcctgcgtgtggcgcatattctttaccacaacccgcgctttgaagtgatggtgcccggcggtacgttgcgctctcataatagcgggatcattggccctagtgcggcgtcctttgtggctgattttcgtgctgattatctggtaacaagcgttggggcgattgagagcgatggcgcgttgatggagtttgatgtaaacgaagctaacgtggtgaaaacgatgatggcgcacgcgagaaatattctgctggtcgccgatcacactaagtatcatgctagcgcggcggttgaaattggtaacgtggcacaggtcactgcgctctttaccgacgagctgccgcccgctgcgctaaaaagtcgcttacaagacagccaaattgaaatcattcttccccaggaagacgcgtaaatttttgtgaccgttaacctggcttcataccttgccacatagccaaacccatcctttcccgctacagttaatttcttgtggcgcgaaaggaggcaaaaatgctctatatctttgatttaggtaatgtgattgtcgatatcgactttaaccgtgtgctgggagcctggagcgatttaacgcgtattccgctggcaagccttaagaagagttttcatatgggggaggcgtttcatcagcatgagcgtggggaaattagcgacgaagcgttcgcagaggcgctgtgtcatgagatggctctaccgctaagctacgagcagttctctcacggctggcaggcggtgtttgttgcgctgcgcccggaagtgatcgccatcatgcataaactgcgtgagcaggggcatcgcgtggtggtgctttccaataccaaccgcctgcataccaccttctggccggaagaatacccggaaattcgtgatgctgctgaccatatctatctgagccaagatctggggatgcgcaaacctgaagcacgaatttaccagcatgttttgcaggcggaaggttttagtcccagcgatacggtctttttcgacgataacgccgataatatagaaggagccaatcagctgggcattaccagtattctggtgaaagataaaaccaccatcccggactatttcgcgaaggtgttatgctaaaaaccattcaggacaaagccaggcaccgtacccgtccactatgggcctggctaaaactactctggcaacgcattgatgaggacaacatgacaaccctggcaggtaaccttgcctatgtgagcttgctcagtttagtgccgctggttgccgttgtttttgcgcttttcgccgcttttcccatgttttccgacgtcagcattcagttacgtcactttatttttgccaactttctgcctgctactggcgatgttattcagcggtatatcgaacaatttgttgccaattccaacaagatgaccgccgttggggcgtgcgggctgatcgtcaccgcgttattgttgatgtactccatcgatagcgcgttgaataccatctggcgcagtaaacgagcgcgaccaaaaatttacagcttcgccgtgtactggatgattttaacgctggggccgctgctggcaggggccagtctggcgatcagttcctatttgctctccctgcgctgggcgagcgatctcaatactgtcatcgacaacgtgctgcgtatttttccgttgctgttgagctggatctccttctggttgctgtacagcattgttcctaccatccgcgtacctaaccgcgacgcgattgtcggcgcgtttgtcgccgcactcctgttcgaagcaggaaagaaaggtttcgcgctttatatcaccatgttcccgagttatcagctcatttatggtgtgctggcggtgatccccattctctttgtttgggtctactggacatggtgtatcgtcttgcttggcgcggaaattactgtcactctcggggaataccgcaaactaaaacaagcagctgaacaagaagaagacgacgaaccatgattgcattaattcaacgcgtaacccgtgccagcgtcaccgtggagggagaagtgacgggcgaaattggcgcgggacttttggtgttattgggtgtcgaaaaggatgacgacgaacagaaagcaaaccgtctgtgcgagcgtgtgctcggctaccgcatctttagcgatgccgaaggcaagatgaatctcaacgtgcaacaggcgggcggcagtgtgctggtggtttcccagtttaccctcgccgcagataccgaacgggggatgcgcccaagtttctccaaaggtgcaagtccggatcgcgcagaggcgttatatgactatttcgtcgaacgctgccgtcagcaagagatgaacacgcaaacaggacgcttcgctgcggatatgcaggtaagcctggtcaatgatggccccgtgacattctggttgcaggtatgagccagcttccagggttgagtcgggaaacaagagagagtatcgctatgtatcaccttcgggttccacaaacagaagaagaattagagcgttactatcagtttcgctgggaaatgttgcgtaagcccctgcatcaaccaaaaggtagcgaacgcgacgcgtgggatgcgatggcgcatcaccagatggtcgtcgacgagcagggtaatctggtggcggtaggccgactgtatattaatgccgacaatgaagcgtccattcgctttatggccgttcatcccgacgtgcaggacaaagggttaggcacgctgatggcgatgaccctggagagcgtggcgcgtcaggaaggcgttaagcgcgtgacctgtagcgcccgtgaagacgcggtggagtttttcgccaagctggggtttgttaatcagggagaaatcaccacgccaaccaccacgccgattcgccattttttgatgattaagcccgtcgccactctggatgacattctgcatcgcggcgactggtgcgcgcagctgcaacaggcgtggtacgaacatatcccgcttagtgaaaaaatgggcgtgcgcattcagcaatataccgggcaaaaatttatcactaccatgccagaaaccggcaatcagaatccgcaccatacgctgtttgccgggagtttattcagtctggcgacgctcactggttggggacttatctggctgatgctgcgtgaacgccacctcggcggaacgattattcttgcggatgcgcatatccgctacagcaagccgattagcggtaaacctcatgcggtagccgacctcggtgccttaagcggcgatctcgaccgtctggcgcgcggacgaaaagcacgggtgcagatgcaggtcgaaatctttggcgacgagacgccgggtgcagtgtttgaaggcacgtatatcgttctgcccgcgaagccatttggcccgtatgaagagggcgggaacgaagaagagtaactgatggagaggggcggtgctgcctctctcattcaggtcatttatattagtccttggctatttcggttatattaaataagaactctataaatttttattcttcgttggctccatacgtgtcttgctacatcactgttcaggagcatttaaatattatttgtagaactgagtggcaattatcgcagataatgcttaattcatcatcttagttcatgtttgagcgatttttgatagtcaaaaccccctctggtgccatacttttctcataaatatttttaaaatctatagctaacaaatattatgcaaagataatggactagcatcattgtcagtatcattcatttactgctctgtatgttatgaataattatgttgtatgtttgctcttaaaccgtgggaaggaggctataatggttgccaatattaatctcattaaacaagaaagttattctgttgttaatttagaaaaacaactttcccgaactgttaccaacaaaattataacgatgagcaagtaaagaccggttggtggcagtactgaccggtctgtgatgaaagattaatttcaccttaaatcctggtgctgttaggatgctgacgtttttcggctacaccattcagattatgcaaataaatatctctgaatataatatattcatagcacccataattcatcctgggcgataactaaaccatttttgagtaataaatgaaacaactgcaacactcttattatttctggaaaacgcctcgcaaaaacaaaacaacatgcaaaaatccgctttttttaaatgattttccggcgtaattttcgcacatacattaatgagtaatatatgtaaggtattggtaatggcgatgaatacggtttttcttcatttaagtgaagaggcaattaaacggctgaacaagcttcggggctggcgtaaggttagtcgatctgcaattttacgcgaagcggtagagcaatatctggaacgtcagcaattcccggtgcgtaaagcaaagggaggcaggcaaaagggggaggtagttggtgttgatgatcagtgtaaggagcataaggaatgacaaaaatttttcattcttgaatataaaaaacagatgcccttattctggtattaatacaaggctgttttacttgaacttataataactgcaactgttacatcatatctggaaaacgcctcgcaaaaataaaaaatgatgcgtaaatgagctttctttaaagattcggcaagggtacttttctctccatagattcaaaaatgatattggcgagatatttatgaactctctggcaggtatagatatgggcagaattttactcgatttaagcaatgaggtgattaagcaacttgatgatctcgaggtgcagcgtaatcttcctcgtgcggacctattaagggaagcggtagatcaatacctgataaatcaaagccaaacagcaagaaccagtgttcctggcatctggcaagggtgtgaggaagatggtgtcgaatatcagcgtaagctgcgcgaggaatggtaatgggaaaaaatgatgtcaatcagattgctgacaacgtgcgcgttgttcatgccggatgcggcgtgaacgccttatccggcctacaaagtcgtataaattcaatgtattgcagtttattggtaggcctgataagcgcagcgcatcaggcaatcttacgcttgtcatcagtctcatgcccataaccttattgatgtggtggtgggtaaattgaggccaaaccggcactggcggcatagcttgaggtggtaacgcggaatacgagagatggtgtcgtcacaccctatgagctgtaatccgggcgacctgcgccacccggaaaacgtcagagattactctccttcacccggaaacaggaacgggttgatggaactgcgggcatagccttcttgctccattcgtgcgtccagtaccagagaggcgaggtcatctgctacggcttcgatttttggatctttttcctgatagagaattttcaggtaagtgtcgcagtcatcgcagctttcggctttaatcgcggcctgttcgtcatccaggctccagtaatgcagtttgccgctctgctcgcagttgctgcattttacgcgcactacgtgccattcagtttcacacaggttgcagtgcaggtaacgtagcccctgagtggtgccaatttgcaccatgctggacaccggcatagaaccacaaaccgggcaatattgacgttgctcgccgtattcagcgcgggctttgccggggatcagattggccatctgcgcccagtagaggctcagtgcagcccagataaacggcgctttatcgctgctgacggagctgaaatcagaggcaaacagcgcgctggccatatcttccagctcctgagtgcttgccttctccagattctcaatcactgccagcgccgggccgctcatttcaggtttcagctcagcaatcagcgccatcagcagcttttgccagtgcttatcacgcggcagaacgtgaatatccagcgggggcttgccttgtgcgctggcttctttaatgcgcgcagtcagatccatctccagcggatggtcgtacagcaccacttcctgggcgtgggcgataagcgcagcaaagcgcaggtaatcacccagaggattattttctgccagctcgcgcagacgctcggcgcggcggttgtataaattcttgagccgagggaacaataacggcggaatcatatccgccgtacgtttctcgctactacccagctcatcttgcgggattatgcgaatactcattcagctttcttttccgttgtcttgcggacctcacggtaccagcgcgggtgatgtttcttcgcccaggcgctggtaacccatccttccaccatggcggtaatcgtgcctttcacccaaagggcggcgtagatatgcaccatgataaccacaattaacgccactgcggcaaaactatgcagcattaacgcgaatcggatcaccgggatactgaaagcaggcgcaaaataaggacgccagataatcacgccgctcaccagcagcagaaccaggaaaataatcgccgcccagaaaacgcatttctgaccgaagttataacgcccggtgtcacctacttcctcgttgacgacgatcttacgaatattcttcgcccaaaagatatcatcccgattgattaggttgtgatgccagtaacggaaaaacatgatgatgaagctggcaaacataaccacgccgacaaacgggtgcagaattcgcgccagctgcggtgtgcccatgatttgcatcaaccagttgaaggacgggaacaaaaagcccagcccgctcaccgccgccaggatgaagcagaaggcggtgatccagtggttgatacgttccggcgcggtgtagcgcacgatggtgtcacgtcgtttcatttgcgctcctcgtctttctcttcgtgcagattattctcttcctcatccgcacggttcggaccgacacccacgtagtggaagatactggccgcaaaggtagccgcaaagccaacagccgcgagcggtttccagatgcctttccagaatttcacggtttcgctgatttccgggttctccggcaagccatgatacagatttggcttgtcagcatggtgcagcacgtacatgacgtgtgtaccaccgacgcctgccggatcgtacagacccgcattgtcgtaaccgcgggttttcagctcagcaacgcgctcgctcgccagcgttttcatgctctctttcgtaccgaagtgaatcgcgcccgttgggcaggtcttcacgcaggctggttcttgcccaaccaccacgcggtcaacgcacagcgtacatttgtagacgcggttgtcttccgggttgaggcgcggaatgtcgaacggacagcccgcaatgcaataaccgcagccaatgcactgctcggactggaagtcgacgataccgttggcatactgaataattgcaccttccgccgggcacgctttcaggcagcctggatcggaacagtgcatacagccgtctttgcggatcagccattccagtttgtcgttctgctccacttcgctgaagcgcattaccgtccagcttttggcgcttaaatcattggggttgtcgtacaccccaatgttattgccgacggtatcgcgaatgtcgttccactcactacacgccacctgacaggctttacagccgatacaggtggtaacgtcgatgagtttcgccacttcttcctggaagtcccgcgcctgaggcgcgggggtcagaccgttagtcgcggaacgacgaatgatatcttgagattgataagccatatgtcgtctccgttacaccttttccacattcacaaggaaggacttaaactccggcgtctgcgtgttcgcatcaccaacgaatggcgttaaagtattggcaataaagccttttttagctacgccttcatagccccagtgaatcggaataccgatggtatcgatatctttgccgttcgctttcagcgtgcgaatacgtttggtcaccaccgctttggctttgatatagccacggttggaggagactttcacggtatcgccctgggcaatgccaagtttattcgccaggctctccccgatttccacaaactgctctggctgcaaaatcgcgttcaacagcgcgtgtttggtccagtagtggaagtgctcggtcagacgataggtggttccgacatacgggaacttatcggctttacccaatgcttcggcgtcgtctttaaagatacgtgcagccgggttgctgataacgtttggatgcagcgggttagttcccagcggcgtttcaaacggctcgtagtgttccgggaacggaccttccgccatcttatcgagggcaaacagacgccccatgccttcctgctgcatgataaacggcccgacgccgctacccggaggcgctgcgctgtagtccggaatatcccagccggtccacttagtgccgtcccatttcagcaactgacgcttcggatcccacgggttaccctgcggatctgcggaggcgcggttatacagaatgcggcggttaagcggccatgcccatgcccagcccagcgtgttaccgaggccagacggatcggcgttatcacggcgtgccatctggttgccttccggcgtccagctaccggcgaaaatccagcagccacaggaggttgtaccgtcatcgcgcaattgggcgaagctactaagttgttggcctttcttgacgataaccgcaccggttgccggatcggtaatatcggccagcgccttaccgttgctctccatcgccacttcttcactagatggctcatgcggaatggcgtagttccatgtcatgttcagcacctggtccgggttcgcgccaccctgttcggcatacatcttgcgcaagcgcaggaagataccggagaggatctcgccgtcagtcagcgcaatccccggggcgtccgcacctttccagtgccactgtaaccagcgaccactgttaacgatagaaccgttctcttccgcgaagcaggtgcttggcagacggaacacttcggtctggatcttgctgctgtcaacttcgttcagctcaccgtggttctgccagaagttagaggtttcagtgttcagtgggtcgatggtgacgaggaacttcagtttgctcagacaaccgatcactttgtttttgttcgggaaactggcaacagggttaaagccctggcagatatagccattgaccttgccctctttcatcatctcgaagtattgcaggacgtcgtagcctttatcccacttcggcaaccagtcaaagccccagctattttccgccgtcgctttatcaccaaagaaggccttcatcatagagacgaagaatttcgggtagttgccccagtagtttacctggccttccagcagcggttttggcgtgttggcggtaaggtaggtttgcagatcggtctgcttctcgcttggcagcgtcatgtaacctggcaggctctggctcagcagccccaggtccgtcagcccctgaatattggagtgaccgcgcagggcgttaacgccgccgcctgccatccccatattgccgagcagcagctggatcatcgccatcgtacgaatgttttgcgcaccaacggagtgttgcgtccagccgagggcatacaggaagctggcagttttatcgtgagcactggtttctgcgatgtattcgcagactttcaggaacgcgtcttttggcgtaccacagatgttttcaaccacatctggcgtgtagcgggaaacgtgctgtttcagcaagttccacacgcagcgcggatgttgcagcgtggtatcgcgtttggcgaagccgttttcgtccagttcataagtccaggaggatttatcgtacttgcgtttttccgcgtcgtagccggtgaacaggccatcttcaaagccgtaatcctcacgcacgatcaggctggcgttggtataggcttcggtgtattcgcggttgaatttttcattgttcagcaggtacagcaatacgccactcaggaaagcaatgtcagtaccggaacgaataggggcatagtagtcagctaccgccgccgtacgcgtaaagcgaggatcgatcacaatcagcttcgcgccgttgtgaattttggcttccatcgcccagcggaacccgaccgggtgagcttcagcggcgttaccgcccatcaccacgacgaggttggcgttcttgatgtcgacccagtggttggtcatcgcaccgcgaccaaatgttggagcaagacttgctaccgttggtccgtgtcagacacgcgcctggttgtcgaccgcgagcatacccagcgcgcgggagaatttttgcgttaaatagccggtttcgttactgctcgcggaagcacacagcatcccggtggagagccagcggttaacagtcacgccttcggcgttttgcgcaatgtagttagcatcgcggtcttctttcatcagtttggcgatgcgatcaaacgcctcttcccaactgatttgctgccatttatcagaacctggcgcacggtattccggaaacttcagacggctttcggagtggatgaaatccaccaggccagcgcctttcggacaaagtgcaccgcggttgaccgggtgatccggatcgccttcgatatggaagatagatgctttggcgttttttgctccgtcaccgaggctgtacatcaacagcccacagcctacggaacaataggtgcaggtattacgggtttcgcgggtgcgcagcagtttatactgccgggtttccgcgagtgctacgctgggtgcaaaacccagtgccgctgccgtggtgcctgccataccgccagcgcagatcttaaagaactgccttctgctgacctgcatggattgctccttgtttcgacattgtcacgtcccatttacattcgcttgctgcgtgtgcagggagtgggagttatttttctttgcggaaggggccgcaaaggtccagaattggctcaatttccctccatccaggaagggtttgtaacagaataccataatgttggtgtgtgtgttcttatctggttaagagaaagtgaaaaaaacacagcgaaaagaaatcgaaaatgtgacaaatatcacaggtgttcgtcaaattgagttatggcggcgtgatgatttacaacacccacggttagatgaggtcgcggaagaagttcccgttgcgctggtctacaacggcattagccatgtggtgatgatggcgagccccaaagaccttgagtactttgcgctcggttttagcctttccgaggggattatcgaaagtccgcgcgatatcttcggcatggatgtcgttccttcctgtaatggtcttgaagtacaaattgagctttccagccgccgctttatggggttgaaggagcgccgccgggcgctggcgggacgtacgggctgtggcgtatgcggcgtggagcaacttaatgacatcggaaaaccggtgcagccgctaccgttcacccagacgtttgatctcaacaaactggatgatgcattacgtcatctcaacgattttcagccagtggggcaactgactggttgtactcacgccgctgcctggatgttgccatctggcgaactggtcggcgggcatgaagacgtgggtcgccatgtggcgctggacaaactgttaggccgccggagtcaagaaggggaaagctggcagcaaggtgcggtactggtttccagtcgtgccagttatgaaatggtgcaaaagagcgcgatgtgcggcgtagagattttgtttgcggtgtctgccgcgaccacgcttgctgtagaagtggctgagcgctgtaatctgacactggtaggtttttgtaaaccgggtcgggcaacggtttatacccatccgcagcgtttgagcaattaattaaaataagtcctgcgaaatatattaaattgcaggacttattcatttcgtgaattttattattttatttataaacaaaatgcgtgtagtggcgttttcttttttcatttattatgttcactctcttatctatatatttataaggcaattaaatgaaaaggaatttattatcttccgctattatagtcgccatcatgtccctcggtctgacgggttgtgatgataaaaaagccgaaacagaaacgctcccgcctgccaatagtcaacctgccgcaccagctcctgaagcgaaacctactgaagctcccgttgcaaaagcagaagctaaacctgaaacacctgcgcaaccggtggtcgatgaacaagcggttttcgacgaaaaaatggatgtctatatcaagtgctacaacaagttacagatcccggtacagcgcagtctggcgcgttatgctgactggctgaaagattttaaacaggggcctaccggtgaagagcgtactgtttatggcatctacggcattagtgaatccaacctcgctgagtgtgaaaaaggcgtaaaaagtgctgtggcgttaacgcctgcgctgcaaccaattgatggcgtggcggtgagttatatcgatgctgccgtggcgttgggtaataccattaacgaaatggataaatattacacccaggaaaattataaagacgatgcgtttgcgaaagggaaaacgctgcaccagacattcttaaaaaatctggaagcctttgaacctgtagccgaatcttatcatgcggcgattcaggaaattaatgataagcgtcagcttgcggaactgaaaaatattgaagaaagagaagggaaaacattccactactactctctggcagtcatgattagtgcgaaacaaattaataacctgataagccaagataagtttgatgcagaagcggcaatgaagaaagtgtctgaactggaaacgctagtggcgcaggccaaagaagcggataaaggcggcatgaatttcagctttattaatagcgcaggccagtatcaactcgaggctaaaaaatacgttcgccgcatcagagataaagtcccgtactctgactgggataaagagcaacttcaggacgcaaacagtagctggatggtcgaagactctttcccgagagcattacgcgagtacaacgaaatggttgatgactataatagcctgcgttaaacgtttttgatgataaatgcagtgtcggatgcggcgcatccgacacagttcaccccttgtgaagtaactccataaatgcctcatatcctgttaacccggcaataatctccgccggatgctgacacaatatgcttgccagatagctaaatatttttagctcatgacgcgcatcggcggcggcgcaggcgatcaagacatggttaatgacttcgttattcacctcaactggttgggcgagggtaataaaaaatccacgaaaacgtcgctcctgttcgctccagcaatgtgggatggcgaggcgattaacaatcaggttttcaccttcgccttcgcgggcgatgatgcgttgtgcttcatcggcggtaatatggtgttgtgcgactaattgcgcacaaatttgccgggtaatatgttgccagctttcaccgcgtacattgctataatgaaaacttccgggggcagagaaaaaacgctccggctgttggcgaataaatgccgtcgccagaaaatgttttatttgttcgataccggcagccgtaatgatattttttacggtgatgtaattatttaccgcgtcatccagtaaataatggctgttgttaatgatcaataacggctcaatctcttcgcgaatggcaacaagttcgcttaagctacgggcaataattacccgacaatttaaaacatcgcgctcaatggcgagctgattaatagtggcaatcgcgttctggtcgctgagcaaaatgatcggctggcgttcgttttgatgccgctccagcgcacaggcaaaatacaaaccgatcagatcgctgtcgaaaaggggaatatcgagctgttcacgcagtagcgtaataaagtgcagactcatatcaaaggccgcaggccaggcggctttcaggttattcatgctgctctggcggtgctcagcaatccacactggtgcggcaaggcaacgtaataaatgcccggtaatattctcaaccagctgcgcatcaataatattcaaactcgcgatgcccggcaccctttgcagcaacccctgcacattatcggcactaattacctgcgcttgctgatgctgtttctctatcaaacccgtcagggttcttacagcgttatcaccaagaaacagaccgctatgttcaacgatttgttttatctcgtcaccgggatattgcggccactcatcggtcagttgattacgcagggcgtaaatcgccagaatcaggctggagagataatcaccctgcatgagcggccagcggtgttggttgtcgcaggccgtggataaatgctgaaggttgtctcgtgttatgcccgccagcggaattaaaaacggatctttgcgcagcaagttcgccagcaagataacgcgtttctcttctgtctcatcaatgaaatggcccaaaccagggcggctggccaggcaacaagtgcgttcataacgctgttttaaccggggcagacgctctgctacccacgtttctggcaaattaagcgcgctggcgagttgcgcacggggagtgaaagtattcagtaataacagcgccagcagccgatcgtcgttatcgtgcttttgcagcaactgaaaaaagctgcggcgctcgaagatttccagctgatagcccgcactgccactggcgaaaatgcgggctttgccgttaagggtgaagttgagatagtcaatatcacgcaggatggtcctgccactaacgccagtctgttgcgccagctcgccaggcgtgcgcggctgttgctccagcagatcgacaatctttaactggcgttcgtttagcattaatccacctgacggaactggctaaacgcgttgactttctccgcagttaaggtcgtcagaaaaccccgtatcagcgtgagcagagcttcgtaatcggctttactaatcataccgctgttggcgtgcagataacgagttggcagacacagcgcgacaaccggacgcccgccgcccatcacgttgtagcgcccgccatccgtcgcaccggttttcatggtggaaaattgcagcggtaaatcgttatgtgcggcacagctttttaacgctgctaccagtttctggttggggaagtagcgcttgtcaaacagcatcagccccggcccctggcccagtttcagcgggtatttaatgttatcaatgcccggaacatcgcccgctacggcggtatccaacacgatcacgacgtccggtttaatgtgttccgcgctggtttgcgccccgcgtagcccaacttcttcttccacactgccaacgccatacagcgtaatttcgggattattcaccgtctgcaatagttcagccatcattgcgcagccgatgcggttatccaacgccttgccgaccactttatcttcgccccagcaggcaaaattggcttccgggctaataaaattaccaatttccacgccgcgcttttccacctcttcgcgactgttcgcgccaatatcaatgaacatctcatcaaaactcagcggttgttgcttttgcttttccgttaacgcatgaggcgcgacggaaccaatcacaccagggattttcactcccttgtgtgtgcgtatggttacccggtggttgagcatgctctgattccaccagccgccaatggtggtaaaacgcagaaaaccgctctcgtcgatgtgggtgaccataaagccgacttcatccatatgtccgacaacggcaacttttggacctttattccccttacgggcaacaaagctgcccagaccatcgaaggtgatttcattcacgcaaggttccagcgtgtttatcagaatgtcgcgaacttcctgttcatcgccgctgacggcgctggcttcgcacaactgttgcagtaactcaatgttcatggacaagctcctgttgcgcggctttcgctttgcggcgtaaccacaatcctttcaggacgataatgaaactaatgttcagcgcgaggccaatcgccagcaccagataaaagctacccaccgggctcatcaggccgatcagcgggtcaaagatacccaaaccaggtgccagacgtttgattccgaaagcgatcaccagcacgccggtaatgccgcccgccagcgtattggcggtaatcatcggcaacggagctgccagagcgtaaggaatagccggttcggttgcgactgtggcaccgaccacaatggcactactggcagcctctttttcctgtcgggtaaacagtttgggcgcaatgaacgtcgcaagacccgccgcgacgggcggcatcagcgcgacaacgccgacgatggcgtaccagtcataaatgtgtttttccagcagactgaagcagaagaaccaggcggttttattgatggggccgcccatatcgaacgccagcatcgcaccgaccagaaacgctgccgcaaacttcatacttggaggaatggtattcaggaagtggagcagcccgcccatgaggtcggacatcaccggcccgataacgtagtaagtgagcacgccgaaaaccagcagagtaacgaacgggatcagcatactaccgagcagcggttgtaatgctttgccaaggcgcactttgcggaaccagaagacgaaatagccaatcgccagccccagcaccaccgcgccgaggaatcccgcaccgctctgggtgccgagcagcgctttgtcgttcgccagatagcaaaccagaaacgccggagcgaaagccggtttatcggcaatgctgctggcaatataagcgcccatgatggggatcataaaggtgaagccaaggtaaccgatggattcaactacccaggtaaagctcggcgcgcctttgctcatatcggtatacggcaaaccgaactgcaccagcatgttggcaagcgccaccaggataccaccgccgatgacaaacggcagcgccgcagagacgcccgccatcaggtggctcatcacgctaccgctttgcacttcctgtttgccaagcttcacgccgctatctgcggcaaaaagctggctgtttgtcggtaattcgctgaaaatctggtcgatatttttcaacgcctgggagatggcaatctcataaactttcttcccggcaaaccgcgcgcgatcatcaccgctcaggccacgcccggtagcgagaatgacgtaatcggcagcggcaatctcttcgctggataagcggttttcaacgccactggacccttgagtttccacttttatggtatgaccgagagaacgggctttctgttccagggcttccgccaccatgtaggtgtgagcgatcccggcggggcagttggtgatcgcgacaatacgtaaggaactctccatcgccacttccttaactgctgagggtttgatttaacaaggcaagcacctggtcggtatcgccctgttgcagttgatgaataaattccttgtgaataattttgcgacacagtgtgccgatgattttgacctgatcctcttcgccgctttgcggcacgccgaggcagatccagcaattgacgtcttcgccatcgctggctttccagtcaatagcctgcgctttgcgggcgaataatacgaacggttgtttaacgcaggcgcttttaccgtgcggcacggcgacaccggaaccaaatccagtagagtgcattttttcgcgcagcagcagggtttgcaggaactggtgactgtcggtgataaaaccgttttgtaacgctattgtcgccaactgcttcagaacggaataagcgccattgccctgaatattcaggtcaatacagcttgcagtaagagctgccattaatcggactccataaaatatattttaatcaattgtaatggtggagcgattaagtgatgagaggcgatatgtcggtaaacaatgacaatttgagacagagtgaaaggtcagatttgcggagtaatgcacataatggttatttaaataaaccacatgaatcattaatgggttattcattatttttgtgatttactcacaatgtatcagggaaatataacttaccgggagatgtaatatgtttaatttttcaaatcgaaatttaaaatattgtgccggaggcatctctggcacattgggcaattacggcaggtaaaacacttcttgcagctcgctactcaccgggctgttatccgggttagcgggcataacatcggtcatatatttccaccaacgttggcagacatcagtgctggcaaccgcattccagcgttcttcagattcaatctctaccatggcaaacagcagattacgcgctttgtcgagatagatggcgtagttatgcgcaccgtgagatttcagcactgcttccagttctggccagatgggattatgccgacgctgatactcttcgtgggcgtcggggtttacctgcatgacaaaggctttgcggatcatgtttgctccttacagcgccagcgcactggcgagtggcgtaacgccgaaacgcttgccgagcgctatcaactcttcacggctgatggtctgtttcatgccgcccatgctataaaccttcactaatacttgtgcacttttttctgcggtgtcgattaaaccgaaggtttcatccagcgtcggtccgctgccgaagacgccgtggaagggccacaacaccaggctatgtttttgcatctcttgtgcggtcgcctggccgatttcgtccgtgccgggcaccatccacggcaaaatgccaacgccatccgggaataccaccagacactcggtgctgccttcccacagttggcgagtgaagaccgcggtgtcgttttcaagtacataggtgagggcgatcaggttggtggcgtggcagtgcatgatcacccgatctttgccgttggtggctttaatgcgctcgcagtgggaaaggaagtgagccggaagttcggaagtggggacggcttcgttggttaacccccaaagaatgtggtagcccgcgccgtcgctgtcgacttttacgatgcctaagttagccgcaggatcaagctggacgttacggaagaatttgccgctgccggtgacaataaacggtgtatttgccagtaaaggcatgggctggctgagcgggatatagcgcggttgttggtggaaattgtcgtgatatggtgcgatatcggcgtcatccaggcgtagcgtcaggttgccgccgttgcgctcatcccagcctttcagccaggcgtcggtggtggctttgatcattccctggacaaaccaggactgagtaatgttttgcatgttctgtgttcctgtaaattcggtgttgtcggatgcacgacccgtaggccggataaggcgctcgcgccgcatccggcaatcaatgcctgatgcgacgctgtcgcgtcttatcaggcctacaactattgccgacctgtaggcctgataaggcacttgtgccgcatccggcaatcaatgcctgatgcgacgctgtcgcgtcttatcaggcctacaactgttgccgacctgtaggccggataaggcacttgtgccgcatccggcaatcaatgcctgatgcgacgctgtcgcgtcttatcaggcctacaactattgccgacctgtaggccggataaggcacttgtgccgcatccggcaatcaatgcctgatgcgacgctgtcgcgtcttatcaggcctacaactgttgccgacccgtaggccggataaggcgctcgcgccgcatccggcagtgtttacccgcggcgactcaaaatttctttctcataagcccgcacgctctccagccattcgctacctgctggcgtatcgtgacgttggcaatacatttcccagaccgcctgccacggcaagcttttctgctcttccagcagtgccagacgcgcagtgtaatcgcccgccgcttccagcttgcgcagctcagcggtaggttccagcaacgcacgcagcagggcttttttcatattgcgtgtaccaatgacccacgcggcaatgcggttgatagaggcatcgaagaagtcaaggccgatatgcacccggtcaaacagatcgtgacgcacaatctcactggcaattgcctgggtttcatcatccagcagcactacgtgatcgctgtcccagcgaaccggacggctgacgtgcagcagcaactgcggcacatacagcatggcggcggaaatcttgtcggaaatcacttcagtcgggtggaagtgcccggcgtccaggcacagcgcagtctggcggctggtggcataccccatgtaaaactcattggagccaaccgtgtagctctctgcgccaatgccaaacaatttgctctcaacggcgtcgatatggtgcgcagggtttagcttctcgctgatcacctcatccagtgctgccagcagacgctgacgcggggcgagacggtcaacggtgatatctttcataccatccgggatccagatgttcatcacgcttggtgtgccgagttgctcgccaaaataggcgctaacgcgacggctggctttgcagtgatcaatccagaactggcgaatgctgtcgtcggcatgggaaagcgtaaagccatcggcgcttagcggatggctaaagcaggaggggttaaaatccagaccgagctgattggctttcgcccattcaacccagtttttgaagtgctctggtttgatctggtcgcggctgactggcgtatcactttccagatagatggcatgtaaattaagccgtttcggccccggaatcagccgcatagcctgttccagatcggcacgtagctcactggcattacgcgctttgcccggataattgcctgtggcctgaatccccccggtcaggctaccttccgggttttcaaaaccggaaacatcatcgccctgccagcagtgcatactaacgggtaaacgatcaagttggcgcagcgcctcctcgacatcaatccccaccgccgcgaaacgctgtttcgctagctcccaggcctgttccagttgagtggtcatgcgcaaagctcctttgtctgtcgtgtagagtgaatctgcgccacatagtgggcaatttcactgtcaggattaggggtaaaggtggtcagattcgcggtggtgctgacgacctgacggaaatcatccacattgttgagttcatccagcgtcattaactggatgccgatattgccgagcgtgctggcttcaacaggcccggcgatcacccgaataccgcaggcatcggcgcatagctggttgagcagcgtgttctggcagcctccgccgacaatatgcagttggctgaaatcttcaccgcgcagctgcgccagctcatgcaacacatcggcatacagcagcgccagactgtcgaaaatgcagcgcgccagttcagcatcactttccgggatcggttgcgccgtttcccgacacgcagcctgaatttcgctgcacatcgtctcaggattaataaagcgatcgtcattgggattgataatgaagcggcaagccggaagtgcctgtgtcgcggagataagcgccggaagatcgttgatttgctgctcctgaagcactcgctgaagcagccataagcccataatatttttcagcacccgatagcgaccttccgccccgccttcattggtgatgttggctgccagtgccgtgtcattggtaaatggcgtctggctttcgaagcccatcaaactccaggtgccagaagagagataagcagcacgactgccgtttaacgggctggcgataaccgcgctggcggtatcatggctggcaacggcgaccactggaatctcattaccctgcgggcaaatccagtgacctatgacattacccggatgcgtcgggcgaccaaaccaggctttgttggccccgctccacgccagtaggctctcgtcccagtcgtcgctattgatattgaccagttgcgtggtcgtggcgttggtatattcccagttcatcttgccggtcaggcgataactgaagtaatccggcatcagcagagcgtgagcaatgtgtggaataagttcaggttgttgctccgtcagcgcacgcaactgataaagcgtattgaagggcagaaactggatgccgctacgttgataaatatcgcgtttgccgagttgttgttgtgcctgcgccattaggccattggtgcggctatcgcgataagcaacgggcaggcccacacgctgaccctgttggtcgagcagcacaaagtccacgccccaggtatcaatcccaatgctatcgatacgaatcccttcctcgcacaccttgtttaatccaaggcgaatggcactttcaaggctatccacatcccaggtgacatagccgttctgactatgcagcccattgttaaaacgatggatttcgcgcagcgtcaggctgcggcattcacgctcgtaacgcgccagcatcacgcgcccactggatgcgccgagatcgacggcgacacaattgcgaaaggtcataatgtgatcctgctgaatttcattacgaccagtctaaaaagcgcctgaattcgcgaccttctcgttactgacaggaaaatgggccattggcaaccagggaaagatgaacgtgatgatgttcacaatttgctgaattgtggtgatgtgatgctcaccgcatttcctgaaaattcacgctgtatcttgaaaaatcgacgttttttacgtggttttccgtcgaaaatttaaggtaagaacctgacctcgtgattactatttcgccgtgttgacgacatcaggaggccagtatgaccgtattacatagtgtggatttttttccgtctggtaacgcgtccgtggcgatagaaccccggctcccgcaggcggattttcctgaacatcatcatgattttcatgaaattgtgattgtcgaacatggcacgggtattcatgtgtttaatgggcagccctataccatcaccggtggcacggtctgtttcgtacgcgatcatgatcggcatctgtatgaacataccgataatctgtgtctgaccaatgtgctgtatcgcagcccggatcgatttcagtttctcgccgggctgaatcagttgctgccacaagagctggatgggcagtatccgtctcactggcgcgttaaccacagcgtattgcagcaggtgcgacagctggttgcacagatggaacagcaggaaggggaaaatgatttacccagcaccgccagtcgcgagatcttgtttatgcaattactgctcttgctgcgtaaaagcagtttgcaggagaacctggaaaacagcgcaagtcgtctcaacttgcttctggcctggctggaggaccattttgccgatgaggtgaattgggatgccgtggcggatcaattttctcttagtctgcgtacgctacatcggcagcttaagcagcaaacgggactgacgcctcagcgatacctgaaccgcctgcgactgatgaaagcccgacatctgctacgccacagcgaggccagcgttactgacatcgcctatcgctgtggattcagcgacagtaaccactttagcacgctttttcgccgagagtttaactggagtccgcgtgatattcgccagggacgggatggctttctgcaataacgcgaatcttctcaacgtatttgtacgccatattgcgaataatcaacttcgttctctggccgaggtagccacggtggcgcatcagttaaaacttctcaaagatgatttttttgccagcgaccagcaggcagtcgctgtggctgaccgttatccgcaagatgtctttgctgaacatacacatgatttttgtgagctggtgattgtctggcgcggtaatggcctgcatgtactcaacgatcgcccttatcgcattacccgtggcgatctcttttacattcatgctgacgataaacactcctacgcttccgttaacgatctggttttgcagaatattatttattgcccggagcgtctgaagctgaatcttgactggcagggggcgattccgggatttaacgccagcgcagggcaaccacactggcgcttaggtagcatggggatggcgcaggcgcggcaggttatcggtcagcttgagcatgaaagtagtcagcatgtgccgtttgctaacgaaatggctgagttgctgttcgggcagttggtgatgttgctgaatcgccatcgttacaccagtgatagcttgccgccaacatccagcgaaacgttgctggataagctgattacccggctggcggctagcctgaaaagtccctttgcgctggataaattttgtgatgaggcaagctgcagtgagcgcgttttgcgtcagcaatttcgccagcagactggaatgaccatcaatcaatatctgcgacaggtcagagtgtgtcatgcgcaatatcttctccagcatagccgcctgttaatcagtgatattagcaccgaatgtggctttgaagatagtaactattttagcgtggtgtttacccgggaaaccgggatgacgcccagccagtggcgtcatctcaatagccagaaagattaattcgccatgccgatgccgacgatgttagcggcgacaataatcaccacacaaccgaggctcaacaccgttaccggacggcgtcctgcattgttccactctttcagcaccagcccgacgataccgccgcacaatacatagaaactcatatgcagcatccaactgatgtagtcatactgcgccggaatgcgggcgtggccccaggcatagaaaaagaattgcagataccacatcaacccgcccagtgtgctgagtaacacattgtgaatgatcaggctttttgccaggctgaagtcggcttttaggctcaaatccttcacttttgccagacgaataaaacagaaaccgaggttaatgatcgcgccgccgcccatgatgacaacatagcttggcagagcgacatacagtggatcgacgccaagtgcggcagcggcttcatgcatcggttttgcggcgttcatcgcaaaggacatcccggcagagaaaatgccgcacatcaccgccagcaccagcccttttttcagattgaactcttcggctttaatgcccatcttgcgctctttcaactgcccggcgcgagttacaatccctacgccaatcagcgccaccagaacgccgagcaacgtcatgcgtccgccttcggtgctaatcaacacatcgaaattgccgttgataattggcgtcatcagcgtaccgacaatcaacgtaatgccaatggcgatgccaattcccatgctcatgccgagataacgcatggtcaggccgtagttgatattaccgatcccccacatagcgccgaacagaaaaacaggcagtcgcgtagagagactaaagctgctgtaatacgcccagaaattcggtagtaacagggcgctgatggcccacggcagaataatccagctaacaatcccaccgacactccacatggtttcccaactccatttttttacttttttgaacggagcgtaaaaacaggctgcactggccgcgccgatcaaatgccaaaatatccccatcgtaatcgcgttactcatcttcttatcctcatcatttttcgtcgcgtcacatctccgacgagatgagtgtaaaaatcgtgctgtcgattaacctttcgcctgttgccgccgttgtcgatttactggcaatcacggcattaagtgggtgatttgcttcacatctcgggcattttcctgcaaaaccatacccttacgaaaagtacggcattgataatcattttcaatatcatttaattaactataatgaaccaactgcttacgcggcattaacaatcggccgcccgacaatactggagatgaatatgagctataccctgccatccctgccgtatgcttacgatgccctggaaccgcacttcgataagcagaccatggaaatccaccacaccaaacaccatcagacctacgtaaacaacgccaacgcggcgctggaaagcctgccagaatttgccaacctgccggttgaagagctgatcaccaaactggaccagctgccagcagacaagaaaaccgtactgcgcaacaacgctggcggtcacgctaaccacagcctgttctggaaaggtctgaaaaaaggcaccaccctgcagggtgacctgaaagcggctatcgaacgtgacttcggctccgttgataacttcaaagcagaatttgaaaaagcggcagcttcccgctttggttccggctgggcatggctggtgctgaaaggcgataaactggcggtggtttctactgctaaccaggattctccgctgatgggtgaagctatttctggcgcttccggcttcccgattatgggcctggatgtgtgggaacatgcttactacctgaaattccagaaccgccgtccggactacattaaagagttctggaacgtggtgaactgggacgaagcagcggcacgttttgcggcgaaaaaataatcatttgccgcctgctgcaatgaggcgtataggccgcatatcagcttaaaaaatgaaccatcgccaacggcggtggtttttttgtgatcaatttcaaaataaaaacaatgatccgataaaaataaaacagcgtttcaattgatgtggttttgatcacttttattgattaaatgaatgtctatcttcgtttccatcaacactgatgctccattgaggaattacgcatcagcccttaaaaatatgccgacaggtgatggaaatgcagataaaacgcagcattgagaaaatcccgggggggatgatgctcgtcccgctattccttggcgcactgtgccacaccttcagcccgggggcggggaaatattttggaagtttcaccaacgggatgattaccggtacggtgcccattctggcggtgtggtttttttgcatgggggcgagtataaaattaagcgcgacgggaacggtactgcgtaaatccggtacgctggtggtaactaaaattgccgtcgcgtgggtggttgcggcaattgccagccgtattattccggaacatggtgttgaagttggattctttgccggacttagtacgctggcgctggtggcggcgatggatatgaccaatggcggactttacgcttccatcatgcagcagtacggcacaaaagaagaagctggggcatttgtgttgatgagcttggagtccgggccgctcatgacgatgattattctgggcactgccgggattgccagctttgaaccgcatgttttcgtcggcgcagtattaccgttcctggtgggctttgccctggggaaccttgaccctgaattgcgagaatttttcagcaaagcggtgcaaacgctgattccattctttgccttcgcgctgggcaataccattgatttgactgtgattgcccagactggtttgctggggatcctgttgggtgtggcagtaattatcgtgaccggtattccgttgattatcgccgataaattgattggcggtggcgatggcactgccggaattgccgcttccagttccgcaggggccgcggtagcgacacctgtgctgattgcagaaatggtgcctgcgtttaaaccgatggctccggcagcaactagcctggtagcgacggcggtcattgtgactagcattctggtgccaattcttacctctatctggagtcgtaaagtcaaagccagagcagcgaaaatcgaaattttaggtacggtgaaataaacctgcttccttaatccccacagccggatgaactaacgttcgtccggtttgctattgagttcctgcctggatacttaccgcgaaaacagcacgcctgacataaaataaatatggtctaatggggaaatttctcgtggagagggaacagatgcgatatccggttgatgtatacacaggcaagattcaggcttatcccgaaggcaaacccagcgcaattgctaaaatccaggttgatggtgagttgatgctgacggagctggggctggaaggtgacgagcaggcggagaaaaaggttcacggcgggccagacagagcgctgtgtcattatcctcgtgagcattatctctactgggcgcgggaatttccggaacaggcggagttgtttgttgcgcctgcgtttggtgaaaacctcagtaccgacggcctgacggaaagtaatgtttatatgggcgatattttccgctggggagaggcattaattcaggtcagccagccgcgcagcccttgctataaactcaattaccattttgatatcagcgatatagcgcagttgatgcaaaacacaggtaaggtggggtggttgtatagcgtgatagcgccagggaaagtgtctgcggacgcgccgctggagttggtttcccgtgtcagcgatgtgaccgtgcaggaggctgccgccatcgcatggcatatgccgtttgatgacgatcaatatcaccgtttactctccgctgccgggttaagcaaaagctggacgcggacgatgcaaaagcgccgactgagcggcaagatcgaagatttttcccgccggttgtggggaaaataacccccggagtgtaggcctgataagacgctatcagcgtcgcatcaggcatcctgctcaaatgccggatgcggcgtaaacgccttatcctgcctgcaaatgcgaagtttaactccgcttatacagcggcaaccaaatcaccagccgtaaaccgcccagcgggctgtcttctgccttcacccagccacgatgctgctgaatggcggtttcaacaatcgccagccccaaacctgtaccgccagattcacgatcgcgtgcttcatcggtacgatagaacggacggaaaatctgttcgcgatcttccgggctaacgccaggaccatcgtcgtccaccgtaatggtgataccgtctttatctaccgcaaagcccacttcaatcttcgtatgggaataacgcagagcattacgaacaatgttttccagcgcactttccagggcgttcggattgccgtacagcggccacggcccaggcgggaagttaactgtcaagctcttgcccatttgctcggcttcgaacgccgcgttatccagcacttcactccacaactggttggctttgatggtttcgctaaccagcgcgtttttttgctgattacgactcatcaccaacagatcgttgatcatgctgtccagacgttgcgcttcggtttcaatacgctccagttccttgctttcaccgctacgacggcgcagtaacgccgtacccagttgcagacgcgtcagcggggtgcgcagctcgtgagagatatcagaaagcagacgctgctgagaggtcatcatgcgctccagcgcggtgaccatctggttaaaactggcacctgcggcaaggaattcctgtggccccgcttccagttccgggtgctggcgtaagtttccctgggcaacttcatcggcagcgtttttcagcttacgcgccggttttgccagactccaggccaaccacaacagcagcggcgtactgaccaacatggtgacaatcagcagtaatagcgggcggtcaaacagtaagttaatgaaatcggattgagaactgctggccggacgaatcagataaagttggtaattatcttcgccatcacgcacggagaacggaccgaccagttccacgcggccatactttttcttctgcggatgatcggcgttatcggcctgaccaataaagttacgaatgatctgcatttcgctgcgttcagcgccgatcacgcggccttcggtggtcaccaataacaaacgctgtcctggcggtgcccacttatcaatcgcccggaacagacgccgccaccacattaaatcgttgggcggatcgttcgccagctccgcttcgacatgctgctcaatcatcagcccctgacgctgttcgctatccagaagctcggtcatctggcgactatcgagcttgggtaacatcaaaaccaacatcaacaccagcgccagcgtcagccagaagatggcgaagatgcgcgcggttaagctgcctatcatgaagcagaaaccatcagatattagctcaactagcagaaaccatcagatagccgcgaccacgcaaggttttaaaccacgggtgaccatctttacgatccggcagtttacgacgcaggttggaaatgtgcatatcaatagcgcggtcgaaaggcgtcaggcgtttgcccaacacttcctggcttaaatgttcacgggaaaccacctgacccagatgctgtgccagcaaatagagcagggtaaactcagtaccggttaactccagcgtttgcccgtcgaagctggcttcctgacggcctggattcagcactaaggcatcaacttccagtgtcggactaccgttgtcgttgttttgctgttgctcgctccagtggctacggcgcaggatcgcgcgaatacgtgccaccagctcacgatcattaaacggtttcgggagatagtcatctgcgcccagctcaaggccgagaacgcgatcaagttcactgccgcgcgccgtcaacataatgacaggcgtctggtgtgtctggcgaagtgcttttaatgtgtcgataccatttttcttcggcatcattacgtcaagcaaaagtaaatcaatgctgtcgtccagaagatcaagcgcctgttccccatcgtgggcaacaatcacgttgaagccttccatctcgagcagctcctttaatagggaagtcagctctcggtcatcatcaactaacaggattttattcattgtttaaatacctccgaggcagaaattacgtcatcagacgtcgctaatccatgactttacgttgttttacaccccctgacgcatgtttgcagcctgaatcgtaaactctctatcgttgaatcgcgacagaaagattttgggagcaaatgatgcgcatagttaccgctgccgtcatggccagtacgctggcagtcagtagtttaagccacgctgctgaagtcggtagtggcgataactggcatccgggtgaagaacttacgcagcgcagtacgcagagccatatgttcgacggcataagtttaaccgaacatcagcgtcagcagatgcgagatcttatgcaacaggcccggcacgaacagcctcctgttaatgttagcgaactggagacaatgcatcgccttgtcaccgcagaaaattttgatgaaaacgctgtgcgcgcacaggcagaaaaaatggcgaatgagcaaattgctcgtcaggttgagatggcaaaagtccgcaaccaaatgtatcgcctgttaacgccggagcagcaagcggttttaaacgagaaacatcaacaacgaatggagcagttgcgtgacgtgacgcaatggcaaaaaagtagtagcttgaagctattgagtagtagcaacagtcgttcccagtaataaaccctgttttccttgccatagacaccatccctgtcttcccccacatgctgtgggggttttttttatcctcaatttgcctgctgcttaatgcattgcagatgatttgcttccgttatactagcgtcagttgatagcgggagtatttatgaatcaatcttatggacggctggtcagtcgggcggcgattgctgcgacggcgatggctagcctgctattgctgattaaaatttttgcatggtggtataccgggagcgtgagtattctcgccgcgctggtggatagcctggtggatatcggcgcgagcttgacgaatttattggtggtgcgatattccctgcaacctgccgacgataatcacagctttggtcacggtaaagctgagtccctcgcggcgctggcgcaaagtatgtttatctccggtagcgcactattcctgtttttgacgggtattcaacatctgatatctccaacaccgatgacagatccaggcgtcggggttatcgtgacaattgtggcgctaatttgtacgattatccttgtcagctttcagcgttgggtggtgcggcggacgcaaagccaggcggtgcgggctgatatgctacattaccagtctgatgttatgatgaacggcgcaattctgctggcgctggggttgtcctggtacggctggcatcgcgccgatgctctgtttgcattgggaatcggcatctatattttatatagcgcgttacgcatgggatatgaggcggtacagagtttactggatcgcgcattgcctgatgaggaacggcaagaaattattgatatcgtgacttcctggccgggtgttagcggcgctcacgatcttcgcacgcggcagagtgggccgacccgctttattcagattcatttggaaatggaagactctctgcctttggttcaggcacatatggtggcggatcaggtagagcaggctattttacggcgttttccgggaagcgatgtaattatccatcaggacccctgttccgtcgtacccagggagggtaaacggtctatgcttagttaatcagtataaaagagagccagacccgcattttgtgtataaaataccgccatttggcctgacctgaatcaattcagcaggaagtgattgttatactatttgcacattcgttggatcacttcgatgtgcaagaagacttccggcaacagatttcattttgcattccaaagttcagaggtagtcatgattaagaaaatcggtgtgttgacaagcggcggtgatgcgccaggcatgaacgccgcaattcgcggggttgttcgttctgcgctgacagaaggtctggaagtaatgggtatttatgacggctatctgggtctgtatgaagaccgtatggtacagctagaccgttacagcgtgtctgacatgatcaaccgtggcggtacgttcctcggttctgcgcgtttcccggaattccgcgacgagaacatccgcgccgtggctatcgaaaacctgaaaaaacgtggtatcgacgcgctggtggttatcggcggtgacggttcctacatgggtgcaatgcgtctgaccgaaatgggcttcccgtgcatcggtctgccgggcactatcgacaacgacatcaaaggcactgactacactatcggtttcttcactgcgctgagcaccgttgtagaagcgatcgaccgtctgcgtgacacctcttcttctcaccagcgtatttccgtggtggaagtgatgggccgttattgtggagatctgacgttggctgcggccattgccggtggctgtgaattcgttgtggttccggaagttgaattcagccgtgaagacctggtaaacgaaatcaaagcgggtatcgcgaaaggtaaaaaacacgcgatcgtggcgattaccgaacatatgtgtgatgttgacgaactggcgcatttcatcgagaaagaaaccggtcgtgaaacccgcgcaactgtgctgggccacatccagcgcggtggttctccggtgccttacgaccgtattctggcttcccgtatgggcgcttacgctatcgatctgctgctggcaggttacggcggtcgttgtgtaggtatccagaacgaacagctggttcaccacgacatcatcgacgctatcgaaaacatgaagcgtccgttcaaaggtgactggctggactgcgcgaaaaaactgtattaatgatttcggaaaaaggcagattcctttaccctgaaaccgatgacagaagcaaaaatgcctgatgcgcttcgcttatcaggcctacatgaattctgcaatttattgaatttgcaaacttttgtaggccggataaggcgttcgcgccgcatccggcatggacaaagcgcactttgtcagcaatatgaggcggatttcttccgcctttttaatccctcaacatatacccgcaagttatagccaatctttttttattctttaatgtttggttaaccttctggcacgctttgctcatcacaacacaacataagagagtcgggcgatgaacaagtggggcgtagggttaacatttttgctggcggcaaccagcgttatggcaaaggatattcagcttcttaacgttagttatgatccaacgcgcgaattgtacgaacagtacaacaaggcattcagcgcccactggaaacagcaaactggtgataacgtggtgattcgtcagagtcacggtggcagtggtaaacaagcgacgagcgtaatcaacggtattgaagctgatgttgtcacgctggctctggcctatgacgtggacgcaattgcggaacgcgggcggattgataaagagtggatcaaacgtctgccggataactccgcaccgtacacttccaccattgttttcctggtacgtaagggaaatccgaagcagatccatgactggaacgatctgattaaaccgggtgttagcgtgatcacgcctaatccgaaaagctctggtggcgcgcgctggaactacctggcagcctggggctacgcgctgcatcacaacaacaacgatcaggcaaaagcacaggattttgttcgggcactgtataaaaacgtcgaagttctggattctggcgcgcgtggctccactaacacttttgtcgagcgcggaattggcgatgtactgattgcctgggaaaacgaagctctgctggcagcgaatgaactggggaaagataaattcgaaatcgtcacgccgagtgagtctatcctcgcagagccaaccgtgagcgtggtcgataaagtggtcgagaaaaaaggtactaaagaggtggcggaagcctacctgaaatatctctacagcccagaaggtcaggaaattgccgcgaaaaactactaccgtccgcgcgacgctgaggtggcgaaaaagtacgaaaatgcgtttccaaagctgaagttattcaccattgatgaagagttcggcggctggacgaaagcgcaaaaagagcattttgctaacggcggtacgttcgatcagatcagcaaacgctgatttccccaggataattatcaaacccggtggtttctcgcgaccgggttttttatttgtcacgattttgcgttacccttgcatctctttgaggtacagggaaaaaaagatgaaaaaagcgggtcttctttttttggtgatgatagttatcgccgttgtggctgccggtattggttactggaaattaaccggtgaagagagcgatacattacgtaagattgtccttgaggaatgtttgcccaatcagcagcaaaatcaaaatcctagcccatgtgcggaagtcaaacccaatgccggatacgtggttttaaaagatcttaatggcccactgcaatatctgttgatgccaacgtatcgtattaacggtactgaaagtcctttgttgaccgatcctagtacgccgaacttcttttggttggcttggcaggcgcgtgattttatgagcaaaaaatacggccagccggttcccgatcgcgcggtttctttggcgatcaactcccgcaccgggcgtacgcaaaaccattttcatattcatatctcttgtattcgtcctgatgtgcgcaaacagctggataacaatctggcgaacatcagcagccgctggttgccactgccaggtggtttgcgcgggcatgaatacctggcgcgtcgggtaacggaaagcgaactggtacaacgcagcccatttatgatgctggcagaagaagtacctgaggcgcgggaacatatgggacgctacgggctggcgatggtacggcagagtgataacagttttgtattgctggcgacacaacgaaatctactgacgcttaaccgtgctagtgccgaggaaattcaggatcatcagtgtgagattttgcgttaaggcgaagagttaaggaaagtaagtgccggatatgaaatccggcacctgtcagacttaagcctgtttagccgcttctgcagctttaacgattactgcgaaggcgtcagctttcagagaagcaccaccaaccagcgcgccgtcgatatccggctgagcaaacagttctgcagcgttagacgcgtttacagagccgccgtactgaatgatcacttgttcagcgatgttagcgtcaactttagcgatgtggtcacggatgaatttgtgaacagcctgtgcctgagccggagttgcagatttgccagtaccgattgcccatacaggttcgtaagcgataaccgcaccttcgaatgccgcagcaccctgagttttcagtaccgcgtcgatctgacgtgcgcaaacttcttcagttttgcccgcttcattttcagcttcggtttcaccgatgcacagaaccggagtcaggccctgctctttcagcaccgcgaattttttcgcgatcagttcgtcagattctttgtggtaagtacgacgttcagagtgaccgatgatgatgtactgtgcgccgatgtctttcagcatagcagcagaggtttcaccggtgaatgcgccggacaggttcaggtccacgttttgcgcacccagcatgatgtggctgccttcagcttcgcgcttcgccatatcgatatacatttccggtggtgcgattgcaaccgcacagccagcaacacctgccagctctttacgcaggttagaaaccagctcgtgaaccatgtggcggctgccgttcagtttccagttacccatcactaaaggatgtcgcattttaattctccacgcttataagcgaataaaggaagatggccgccccgcagggcagcaggtctgtgaaacagtatagagattcatcggcacaaaggctttgctttttgtcatttattcaaaccttcaaggctttcagatagcgccagcttaatcggttcaacagcgaaggtcagccccttttcgccgttgtccgcgacaacataacgcagtgcaccttctgtctcggtgtaataacgtttgtttttccccgccgttagtaggctctgcagttttttctggctttgtgttttggtcattaatggggtgagtgtgcggatcaccgctgccatgtattcctgagctttcgctttcgcggctttttgctctggcccctggatgggtagccaggtcatttgaatgcttttgatttttaaggtaccgcgctccagcgctgtagaagcatacaagttctcattaattttacttgcagcacgagtgagattggctttgtcgggactgctgtcgatggcacgaaattcgttcagtggcaggctgggattctggctgttaaagtcttctcgaaactggctgatggagagatcgaaagtaggggctccagccagcagataaggcgcggtcgttgccgtatctggtgtttgtgcatgcgcctctgttgtaacggttaatgcagaacataagagaaaaaacagcgtacaccctggcttcattgacagtaccttttgttatgactggctccgattaaaacgatatctgtcgcccttgtcaaaagggtagaatcctggaaaagacaaccatcaaggaacttacatgaccatacagcaatggttattcagttttaaagggcgtattggacgccgtgatttctggatttggataggcctgtggttcgcaggcatgctggtgcttttcagtctggcgggtaagaatctactcgatattcagaccgcggcgttttgccttgtgtgcttgctctggccaacagcggcagtaactgttaagcgcttgcatgatcgcgggcgttccggcgcatgggcatttctgatgattgtggcgtggatgctgctggcgggtaactgggcgattttaccgggtgtctggcaatgggcggtggggcgttttgtcccgacgttgattctggtgatgatgcttatcgatcttggtgcgtttgttggcacacaaggcgaaaataaatatggtaaagatactcaggatgtgaagtataaagccgacaataaaagtagtaattaacctttaatatatctcttactgctatttttttccgggattgttatttccacgatgcaaatgacaatacccggaaaatccttctgaactcttcaccttaagcaatatcaaaaaaaatggtaatccataagatcattacttgtttgttcttcccttaacggcgcattattcttaagtcgtaatcgacagagaggcgaatatacagaggtgccctatgaaagatgtcgtagataaatgcagtactaaaggatgtgcgattgatatcggtacggtgattgataacgacaactgtaccagtaagtttagccgcttttttgccacccgcgaagaagcagagtcttttatgaccaaactgaaagagcttgccgccgctacatcctctgcagatgaaggggccagcgtggcctataagattaaggatctggaggggcaagttgagcttgatgcggccttcactttcagttgccaggccgagatgattatttttgagttaagtctgcgtagcttagcttgatggagttgctttagaaggagttaaacatggcttataaacacattggcgtggcaatttccgggaatgaagaagatgccttactggtgaataaagccctggagctcgccagacataatgacgctcacctgacgttaattcatattgatgatggcttaagcgagttgtatccgggtatctacttccctgcaacagaagatattcttcaattgttgaagaataagagcgataacaagctgtataaactgacgaaaaatattcaatggccgaagacaaaactgcgtattgaacgcggagaaatgccggaaacactgctggaaattatgcaaaaagagcagtgcgacctccttgtctgtggtcatcatcacagttttatcaaccgtttgatgccggcatatcgcgggatgatcaataagatgagtgcggatttgctcatcgtgccgtttatcgataagtaaccgcttaccagtaatgctccgctgtcatatggcccggtcggcgacgtaaatgtttcgtcatctgccgggtctctttcagcaactgttgtgtatcgcgcaccatctgtggattgccgcacagcatcacatggctggtttctttattcatcggcaggccaatcgtgctttccagttccccactttcaattaatgccggtatccgtccggtgaggctccccgctgccgtttcccgactgaccaccgtctgaatgcgcagttttccttcgtagcgtttttccagttcctgcatcagtggcaaatagcttaagtcggcggcataacgtgcggcgtgcaccaggaccagatttttgaagcgatctaaatctttacctagttgcagaatgcttaaataagggccaatcgctgtaccggttgccagcatccatagcgtttcgcagtgcggcacttcatcgagcacaaagaatcctgccgcttcgctaaccacctgcacttcatcgcctggtttcagtgccgccagtcgtgggcttaatttgccatcggggacggtgaccaggtaaaactccagatcgggattatcggggctgtttacataggagtaggcgcgctggacgcgttcgccgtcgatttcaaggccaagcttggtaaattgcccggcggtaaacggaagcacgggggcgtgaacggtgagactaaacagggcgtcggtccagttctgcactttagtgactttgcctgttacccaatcagccatgtttttctcctgttttgattgacttgccttatcttcgttctccgaacaaaaaaattccagtcccgaaggactggaaggctcaatcgatcaaatcaatcagaggatgtgcacctgcatttccgggtctttgcgatccagatagtggatggactgaatgcggcgaatggtgcgactcttgccgcggatcagcagcgtttcggtagtcgcgatattgcctttgcggctaatgccttccagcagatcgcctttggtaataccggtggcagagaagatgacgttatcgctgcgcgccatatcgcccaggcgcaatactttaccggcttcgatgcccatcgctttgcagcgtgccagctcctgctcgccaatgcgacgattctcttcgttgtcgcctttgacgtcatgacgcgccagcagacgaccgttcatgtcgccatctaatgcgcggatcaccgccgcagaaactacgccttccggcgcgccaccaataccgtacagcacgtcaacttcgctgtctggcatacaggtgagaatactggccgcaacgtcgccgtccggaatagcaaatacgcgtacgccgagttgctgcatttcagcgataacggcatcgtggcgtggtttagccagaatcgttaccgtcagttcgctcaacggtttgccgagcgccgccgctacattgcgcaggttatccgccagcggcaggttcagatcaatggtgcctttggctcccggcccgacaatcagcttctccatatacatatccggcgcattgaggaagcagcctttatcgcctactgccagcaccgccagcgcgttagcctggcccatcgccgtcatgcgcgtgccttcaatcggatcaacagcaatatctaccgcgtcgccgcgaccagtaccgactttttcaccaatgtagagcatcggtgcttcgtcgatttcaccttcaccaatgacgatggtgccgtcaatgttgacctggttgagcataatacgcatggcgtttaccgccgcgccgtccgcggtgtttttatcgccgcgtcctaaccatttgtagccagccagcgccgcactttcggtgacgcgggaaaattcgatggcaagttctcgtctcatagcaaactctaagcagtaaggaatggcgcgaagtgtagcacaggggaagggagggattattgatgtgtgcggggttgcccccgcacgtttcgggactaccggatgcggcataaacgcttcattcggcatttacattattcgtcgtgttcttcccacgccatcgcgcgtttaaccgcttttttccagcctgcgtaacggtaattacgctcagtggtttcgatgcctggacggaactcgcgctcaatcaccgctttctcttgcagctcgtcgaggttctgccagaagccaaccgccaggcctgcgagataggccgcacccaatgcggtgacttcgcgcacttccgggcgctcaacgcgggtgccgagaatatcggactggaactgcatcaggaaattgtttgctactgcgccaccatccacgcgcagggcgtgcagacggataccagagtcggcctgcatcgcttccagcacgtcacgcgtctgataagcaatagactccagcgtcgcgcgtataatgtggttagcgttcaccccacgagtcagaccgaaaatcgccccgcgcgcatacgggtcccagtacggcgcacccagcccggtaaatgccggaaccacatacacaccattggtgttttgcactttggtggcgaaatattcggaatcgtaggcgtcgttaatcaacttcatttcatcgcgcagccactgaatggatgcgcctgccataaacaccgcaccttccaacgcatagttcacttcgccagtcgggccgcaggcgatggtggtcagcaggccgttttcacttttcaccgctttctcgccagtgttcatcagcataaagcagccagtgccataggtgttcttcgccatcccttctttcacgcacaactgaccaaacagcgcggcctgctggtcaccggcgatcccggagattggaatacgcgtgccgcctttgccgccaatgttagtctgaccgtatacttcggaagaacgacgcacttctggcagcatctcgcgcggaatatccagcacttccagcattttgtcgtcccagtccagggtatggatgttgaacaacatggtacgagaggcgttggtgtaatcggtcacatggacacggccctgagtcattttccagataagccacgtatcaaccgtaccaaacagcaattcaccacgacgtgcacgctcgcgagagccttccacatggtcgaggatccacttcactttggtgccagaaaagtacgggtcaatcaccagaccggtattgctgcggatataatcttctaaaccgtcacgttttaaatgctcgcagatttctgcggtacgacggcactgccagacaatggcgttatagataggcttgccggtttctttttcccagacaatagtggtttcacgctggttcgtaataccgatagctgcaatttgatcggaactgatatcggctttcgccagcacttctaccagcgtggagctttgggtggcccagatttccattgggtcgtgttctacccaacctggttttgggtagatttgctcaaattcgcgctggctcacgctaatgatattggcatcgtgatccattacgaccgcgcgggagctggtggtgccctggtcgagcgcaacgatatattttttttcagtcatgtttaattgtcccgtagtcatattacaggctagctttttgttcactaggagttgtggtttccttttcttccacaacacagatatcgcaaggcaaatggcgaccaatcagtttgcggtaggcaaatgcacctacaatcgcgccaacgatagggccgaaaagcggcaccaggaagtaaggaatgtctctgccgccggtaaaggcgacattgccccagcccgccagccaggcaaagactttcggaccgaagtcacgcgctgggttcatggcaaaacctgtcaatgggcccatagatgcgccaatgaccgcaatcagtagaccaatcagcaagggagccaaagggccgcgtggtacaccgttgccatcgtccgttaacgccaggatcagccccatcagaatagcggtaatcaccatctcaactgcgaaagcctgcacaaaattgatatgaggattagggtaagtagagaaagtgccagccagatcaacactttcaacgctgccgcgaacaatgtgatgagtctgctcgaagtcgaaaaataaattgtagtaaagcccgtaaactaaagccgcagcacagaaagcgccggcaacttgactaacgataaaaggaataactttgcgcttgtcgaaacaggcaaacagccacaatgcaatggtaacagcgggattaagatgcgcgccggaaacccctgcggtcaggtagatggccattgccacccccagtccccaaatgacactgatttcccactgaccaaaagacgcaccagcgacttttagtgctgcaacgcaacccacaccgaagaaaatcaacaacccggtaccgaggaattcagcaatgcactggcctttcaaggtacttgtttgactcataatcggatcctgaagagttaatgtttgttgtatgcgtgaaagtcacggacctccacgatgcttgtaggcatgctgtaaacttatcgttaacgagcaaaaacgagaaatatcgaacttaaaatgtgtgtgcctcgtcataaaatgagcgttatcgcgccatttattccatctgattgtacatgatgcatgtttgttagatcattcgcgcaacaaatttattaacattttcgattgatgtggattatgtcaccaggagaaggatgaaaagtgtggcaaaccgtaatctgcaaggcgtgccgctggacagcgatggcgcggcttcatacaatcggagctaactaaagtgcgctcgtatttattaaggcgtcaccggtaatcgggacgaggatttttatccatcaacgccttgcaattcaggagaggtatgacaatgagtttagaagtgtttgagaaactggaagcaaaagtacagcaggcgattgataccatcactctgttgcagatggaaatcgaagagctgaaagaaaaaaacaacagtctgagccaggaagttcaaaatgcccagcatcagcgcgaagagctggagcgtgagaacaaccatctgaaagaacagcagaacggctggcaggaacgtctgcaggccctgctgggtcgcatggaagaggtctgattacgcttcatcttccgcgtaatttctttactgtgtaggccaacaggtaacgcagaaaaaaggcaccttgcggtgcctttcttatcattcaatatccagcggatcttcactaagaataatcccggtattgtcggcataaagatggtcgccggagaagaaggtgacaccgccaaaattgacgcggacatcgctttcgccaatgccttcgccagcggcaccaaccggaattgccgccatcgcctggatgccgatatccaactcttccaggtcatctacctgacgcaccgcgccgtaaatgaccagaccttcccattcattttgtactgccagacgcgccagttcagcatcgaccagtgcgcgacgaacagaaccaccgccatcgacgacaagaacacgaccacggccattctgttcgagcagatcgtacagcaacccgttgtcctcgaaacattttaccgtgattatttgtccgccaaagctcgcccgtccgccaaagttggagaacagcggttccacgacgttaacatcttcttgatagatgtcacaaagctcggaagtatcgtatttcataggcttaacattcagttgctgcgagaattttcagtatatcgcgctatgtgggctgttggcaaaatcatcaattgttaattgatatttgtcagttatgctgcccactggcttaggaatatccctaaaacaaacagcaggttagtcagtaacgctcccttgacagtacgttccagcattggtcgcatcgccaccgggtccatttcccgcatcacataacgggcttgcttcaccagtaatggtgccgccagcaggaacagccagccccacaggctatgcaggctaaagagattaaacagcgccagacacaccaggctgcccatcagcaggcaggcatgataacgacgcgcgttcacttcacctaagcgcaccaccagcgtgtttttgccattttcgcggtcgctattgatatcacgcaggttattaatattcagtactgccgttgccagcaggccgcatgcggtcgccggaaggatcagtgccggaatcaatgtatgagcctgtaaataccagctccccatgacactcaaccagccaaagaaaaccagtacggaaatatcacccagaccgatataaccataaggacgattgcccacggtgtaggtgatagcggcaatgatgctcaacccgccaagaatcaggaaaccgacaaaatcggccagcgtatggcatgccactgcaaccagtgccagcccggagagacagatgagcacgacggtaataatgagcgcccgtttcatctcttgctgggtaatgacccctttttgcatgccgcgtagcggcccaatgcggtcaggtttatcgctgccttttaccgcatcgccgtaatcattggcgaggttagaaaggatctgtaatagcccggcggtaattagtgccagcagggcgaccagcggatcgaagtgaccttgccaccatgccagcgctgtcccgacgataattgcagcaaaggcgagggggagggttttaggtcgtaaactttccagccacgcctgagttcggctaatttgttgttcagtcataatacgcgccaataaaaatggggcctttcagccccatcaaacaatgatgaaaatgattgaacgcgattataggataaaacggctcagatcttcatctgccaccaacgcatccagatgtttgctcacataatctgcgtcaatagtgatattttgaccgcttaaatcgctggcgtcgtaggaaatctcttccattaaacgctccagaacagtgtgtaaacgacgagcaccgatgttttcggtagattcgttcacctgccatgccgcttccgcgatgcgtttaataccggagtcggtaaactcgatatttacgccttcagtcgccatcagtgctttgtactgcacggtgatagaggcattcggctcggtcagaatacgctcgaagtcgctggtggtcagcgcctgcagttcaacgcggattggcagacgaccttgcagttccgggatcaggtcagacggtttcgcaatctggaacgcgccagaagcgataaacagaatgtggtcagttttgaccatcccgtgtttggtggaaacggtgcaaccttctaccagcggcagcaggtcacgctgaacgccttcacgagaaacatccggaccggaagactcgccgcgcttacagattttgtcgatttcgtcgataaacacgatcccgtgctgctcaacagcgtcgatagcgtcttgcttcagctcttccgggttcaccagtttcgccgcttcttcttcaatcagcagcttcatggcgtctttgattttcagcttacgcgctttttgcttctggccgcccaggttctggaacatggactgcagctggctggtcatctcttccatgcccggaggagccataatttcaacgcccatcggtgctgcggcaagatcgatctcgatttctttgtcatcaagctggccttcacgcagttttttgcggaatgcctgacgagcagcggacggttcctgctgctgttcggtctgtccccagttgtttttagcaggtgggatcagcacgtcgagaatacgttcttctgccagttcttcagcgcgataacggtttttctcgatagcctggacgcgtaccattttcacggcggcatcggtcagatcgcgaataatagaatccacttccttaccgacgtagcccacttcggtgaatttggtcgcttcaactttgatgaacggcgcattcgccagcttagccagacgacgggcgatttcagttttaccgacaccggtcgggccgatcatcaggatatttttcggggtcacttcatggcgcagctcttcgttgagctgcatgcgacgccagcggttacgcagagcaatcgccacagaacgcttggcgttgtcctggccgatgatgtgcttatccagttcgctgacgatttcgcgtggggtcatttcagacatgggagatccttacgctttgtagcttaattcttcgatggtgtggaaatggttggtatagatgcaaatgtcgcctgcaatatccaacgccttttcagcaatttcacgggcgctaagttcagtgttttctaacagcgcgcgcgccgcagcctgggcgtaagggccgccggagccgatagcaataagatcgttttctggctgcaccacgtcaccgttaccggtgatgataaggcttgcagtttcatccgcgactgccagcagtgcttcaagtttgcgcagcatgcgatcggtacgccagtcttttgccagctcaacggcggctttgaccagatggccctgatgcatttccagtttacgttcaaacagttcgaacagcgtaaaagcatccgcagtaccgcccgcaaagcccgcgatgactttgtcgttgtacagacggcggacctttttcacgttgcctttcattacggtattgcccaacgtggcctgaccatcaccagcgatgaccacatggccgttacggcgtacgcttactatagttgtcacgagctgaccccttggttacgaatacagagtacaaaccccgtacaaaagtacggggcataatgcaattatagatgggggggattttgagggtttcaacccccggcggcgagccgaatgcagtttgtatgacccgccatcttcaaccgattgagggtgctgtctgcgttctctttgcctttcaccgggccaatgaccacacgattccagccattgttggtggtgattttgctgtcaaagccttcgaacgccagctgagcacgtaccgtctctgcctgttccgcgcctctgaagctaccgcactgcaccatccagcggcgttcgtcttttttctccgccgtcggttttggcgcgtcagcggcacgagcaactggcgcagcttgctgcggcttgctctgcgcagtcgtgtgcgcaggagtttgcagcagatcctggtacggctgctgagaagaagccggtttagactggcgcggttgcgcctgtaccggtgcggcttggctcgtacgcgtctgctgctgccagctttgttcagtcgtacggctctgctgagccaggcgttgctgttccgctaattgctgcgcctgacgttggcgctgtagcgtttgctgacgctgttccggcgtctgttcattccacggaacttcaaccagctgcgttggctgctggcgcatatcagcctgcatttgttcaagaagctgacgttgttctggtgtcagttgctccggcgttttcacttcaccaccggcagaaggttctgtgggcgcacgcactcccggctggcgactttccagctctttaatgtagcgccagcgttcttctggttttggtggtagtccgtttccggtcactttctggctttgcagcgtctcggactcttctttcttgtgatgcgtaatgaagtacagaccaccgataaaggtcacaagaacggcggcagcaatagcgaccatagcgggagaaaccgcaggcagatttcgttgctttttccgactggtgctcttttttcgccggctaggtgccggttggctgcggcgtacataatctcgttgtgccactatcgtttcgctgtatttattcgttcgtcagcccgccatgttacttaagcggcgggcctttgaccagtcacggcagtcttaaaggtttactttaaggtaacgcgcgtgtacttccccggatgataagttcgcagtccattaaacgagagccactgccaacgtgttgcccctgcatttgatcaagcaataacagcatagcttcccgaccgatttcgtaacgcggctgcgcgatggttgtcagcggcggatcacaaaattgcgtcaggtcgatgttatcaaaaccgattatggaaaggtcttccgggactttcagcccctggcgttttgcctgagaaagtgcgccgagcgccatcacatcgctatggcagaagacagcagtaggcggttgtggaagatcaagcagctgctgcatcgctttgcttccggcttcgaaggtgaagtcgccacgggcgatgtattgcggatcaaccataatgccgcagcgacgcagcgcctgaacatagccttgcaggcggtagtgacacagcggcatctcttcgggaccggctatacagccaatccgtttatgcccttgctcatataaataatttactgcatcaaatgcggcggtcagattgtcgatatgaactgtaggcagctccagctccggtgcaaattcgttcgccatcaccatcggcggcagattacgctgttcctcaatgctggcatcaaacggcagcctactacccagcaacaacatgccatcaatttgcttggtgatgatcaaatcgataaaggttttttcctgctgattttgatgcgcacagtcgccaatcagcaccagatatccgtgatttgccgccgtaacttcgataccgcgaataatttcgctaaagaagggatcgcagatatccgggacaatcaccagaatggtgcgggattcattacgcttgacgttgcgccccataggctgcggtaaataacccacttcccgggccgctttttcaacccgattacgggtggcctgggagactttatcgggattcattaatgctcgggagacggtcgctgtagagacttttgccttgagggcaacgtctttcatggtcgcggcagtttcctgcttcttcgctttcacactcactcctcgcctggcacgtcaggcgtactacatccatgtttacttcacatcggcaacatttttagcagatagcgcgtgaaaacggttacagaattttcatgaaaagtgtgatgaatattgaatttttcgatccgcctcgcatcgtgagcggtttaaccctcaatcggatcaacatccagcacccatttcaccttacgggaatccggtattgtattgatgagcgccagcgtaccgttaatgatgtgttgcaagcgcacgcgggaagggtgctgcaacaatatctgccagcgccagcgaccgccacgtttaggtgccagagccggaaccggaccgagaacccacagtttctcgtctgccagtgggctggagaggatcagattacgcagttgttgcaggaacaatggcgcgtgctgattgttatgatcttccgcacgcacaatcacatggctggtccacggcggtagctgcatcattcgccgctcagccagcgcctgttcggcaaaggcgtcgtagcctttatagagcaacgtttgcaacagaggatgttccggatggtgcgtttgcagcaccacttcgccctgtttacccgcacgcccggcacgaccggcgacctgggtgtaaagctgagcgaaacgctctgcgctgcgaaaatcggcagaaaacagcgcgccgtccacgtccagtaatgcaaccagcgtcacatccgggaaatggtgacctttcgccagcatttgtgtaccaatcaaaatccgcgcgccgccgcgatgtacttctgccagttgctgttccagcgcccctttgcggctggtggtatcgcggtcgatacgagaaatgggcacgccggggaacaacggcgcgagcgtctgttcaagctgttcggtgcccagccccacggggaccaggtgcgtggaaccgcaggaagggcactggcgcggcaccggacgctgactgtcacagtggtggcagcgcagatggtgctgcgcctgatgcagcgtgtagtagtgatcgcaacgtgggcattcggcaatccagccacagtcgtggcacagcagtgcaggcgcaaagccacggcggttaagaaagagaatgacctggttatcagcctgtaaatgctggcgcatacgagtgattaacgccggagccagacctgcctgcaccttctgaccttttaaatccagcacatgttgaattgccggacgcgcattccctgcccgacgggtcaggcgcagcaggcggtattttttctgctggacgttgcataacgtttccagcgcgggcgttgcggagccaagaataatcgggatttgctcgctgtgcgcacgatacaccgccaggtcgcgggcatgatagcgccagccttcctgctgcttgtaggagctgtcgtgctcttcatcaatgacaatcacgccgagatttttaaacggcgtaaacagcgcggagcgggtgccgatcacaatcgccgcctcaccatttttcgctttcagccacgcgctaagacgctcgctgtcgttcaggccggaatgcagaacttccacgggggcattaaaacgttcacgaaaacgggcgatagtttgcggtgtcaggccgatttccggcaccatcaccagcgcctgtttgccctgagcgagcacgttttccagtacgctgagataaacctccgttttaccggaaccggtaacgcccgccagcagccaggcagaaaaagtatctgccgcgctatgaattgcgccaacggcggtggcctgttcggtattcaatcgcaaccgctcaccagaaacggcatagttcgttcgccagtcgctaaactctggtgtttcacttgctaaatcacacagaccttttttgcgtagcgcctgcaacgcggcatcattaaattcgagcgtggcgacctggtcgcgccagattttgccttgccgtaacgccgccagcgcctgttgttgcttgggggagcgtttcaggctgttcagatccaccgcctggccttgttcagtggcaaaccagtaccacatcggcgcgttcgccgcaggccgcccctggcgtagtaaaatcggcaaggcatgaaacagcacatcgccaatcggatgatgatagtaatctgccgcccatagcagcaatcgccagacggagtgagtaaacaccggctcactatccagcacttcgactaccgcttttagctcattgagcggcagttcgctggcatcgctaacacttaccacaatcccgatgcgctcctgctgtttgccaaacggcacgcgcacgcgacacccagctttaaccgtcatgccttctggcagcagatagtcaaaggtacgaggaagcggaacgggcaaggcaacgtgggcaacgggcatagcatcatcctgacttgaaattcggtgggttagtatacacattgccgtagaagagtgcggatcagtttgcatacgctggttaatttctgtatgatttcgcgccttcgtacgaaatgatcgtattgaagctatacttttaacatcgcgtggtgtctggcgttagggctggaagagcgacgcggccttaaaccgaggttttcccatgaaaaaagatattcacccgaaatacgaagaaattactgctagctgctcttgcggtaacgtaatgaaaatccgctccaccgttggtcatgacctgaacctcgacgtgtgcagcaagtgccacccgttcttcactggcaaacagcgtgatgttgctaccggtggccgtgttgaccgcttcaacaagcgtttcaacatcccgggcagcaaataagaccggatttccgaaaaaagcgccgcacggcgctttttttgtgcctgaattttggtcgtattaccagctaaacagcggccattctttggcgaccgtggtgagttgtggcgcatcgaaaacggcttgtgggctgaccaccgtttcctcaagcggaatattcttgccgtaacgttctttgagctttgcctgaacttgtgggctgctcaggtcgaactctttcaacttctgctgctcgcccacgcgcattcccagcgcgttctggtaaaccttccacaccacttcgctacagtactggcgatcgtcgctccaactgaagctgaaatcatacggtttaccgagataacgttttgccgtttgcgccagtttttgctgttgttcaacactcagtccgccttcaacgcggcgaacaacgtatttgcccttttcaccatgggcgatccactgcttgagcggggtgtatttcaccgggccgactgcttcaaaaacgtagggctttttgttgcgtatcaccagcataccggtgtggctataatcggtatgggtcgccagttggatcgctttactttggctactgcgagagatctgaaagatgatgtcgccggtttgtggctgccaggcaaaggcaggtacagaaaccagcaggctgaggatcagcagcctgtttttcatagttaaacgtccatgtataaaaagcggtgggtcgcagacaacgtgctcgttgtttatgccggatgcggcgtgaacgccttatccggcctacaagttcgtgcaaattcaataaattgcaatatgacgtaggcctgataagcgtagcgcatcaggcgattccactccgcgccgctcttttttgctttagtattcccacgtctccgggttaatccccatctcacgcatgatctcttttgccgcttccgggatttcgtcgctgcgctctttacgcagatcggcatcatccggcaaaggttgcccggtaaaggcatgcagaaacgcttcgcacagcagctcgctgttggtagcgtgacgcaggttgttcacctgacgacgcgtgcgttcatcggtgaggatttttaacaccttaagaggaatggaaaccgtaatctttttgacttgttcactcttcttgccgtgctcagcgtatgggctgatatattcgccgctccattcagccatgagatacttaatcctcttcgtcaataaattgagaccagaccacacagttgatgtgggtactgaccgtaaacccgcatagtttaccgtacaggcgttaccgtgacatcgtgtaatgcacctgtcggcgtgataatgcatataattttaacggctatttgggatttgctcaatctatacgcaaagaagtttagatgtccagatgtattgacgtccattaacacaatgtttactctggtgcctgacatttcaccgacaaagcccagggaacttcatcacatgacgcgtaaacaggccaccatcgcagtgcgtagcgggttaaatgacgacgaacagtatggttgcgttgtcccaccgatccatctttccagcacctataactttaccggatttaatgaaccgcgcgcgcatgattacagccgtcgcggcaacccaacgcgcgatgtggttcagcgtgcgctggcagaactggaaggtggtgctggtgcagtacttactaataccggcatgtccgcgattcacctggtaacgaccgtctttttgaaacctggcgatctgctggttgcgccgcacgactgctacggcggtagctatcgcctgttcgacagtctggcgaaacgcggttgctatcgcgtgttgtttgttgatcaaggcgatgaacaggcattacgggcagcgctggcagaaaaacccaaactggtactggtagaaagcccaagtaatccattgttacgcgtcgtggatattgcgaaaatctgccatctggcaagggaagtcggggcggtgagcgtggtggataacaccttcttaagcccggcattacaaaatccgctggcattaggtgccgatctggtgttgcatagttgcacgaaatatctgaacggtcacagtgacgtagtggccggcgtggtgattgctaaagacccggacgttgtcactgaactggcctggtgggcaaacaatattggcgtgacgggcggcgcgtttgacagctatctgctgctacgtgggttgcgaacgctggtgccgcgtatggagctggcgcagcgcaacgcgcaggcgattgtgaaatacctgcaaacccagccgttggtgaaaaaactgtatcacccgagcttgccggaaaatcaggggcatgaaattgccgcgcgccagcaaaaaggctttggcgcaatgttgagttttgaactggatggcgatgagcagacgctgcgtcgtttcctgggcgggctgagcttgtttacgctggcggaaagtttagggggagtggaaagtttaatctctcacgccgcaaccatgacacatgcaggcatggcaccagaagcgcgtgctgccgccgggatctccgagacgctgctgcgtatctccaccggtattgaagatggcgaagatttaattgccgacctggaaaatggcttccgggctgcaaacaaggggtaaaaatgagtgtgattgcgcaggcaggggcgaaaggtcgtcagctgcataaatttggtggcagtagtctggctgatgtgaagtgttatttgcgtgtcgcgggcattatggcggagtactctcagcctgacgatatgatggtggtttccgccgccggtagcaccactaaccagttgattaactggttgaaactaagccagaccgatcgtctctctgcgcatcaggttcaacaaacgctgcgtcgctatcagtgcgatctgattagcggtctgctacccgctgaagaagccgatagcctcattagcgcttttgtcagcgaccttgagcgcctggcggcgctgctcgacagcggtattaacgacgcagtgtatgcggaagtggtgggccacggggaagtatggagcgcacgtctgatgtctgcggtacttaatcaacaagggctgccagcggcctggcttgatgcccgcgagtttttacgcgctgaacgcgccgcacaaccgcaggttgatgaagggctttcttacccgttgctgcaacagctgctggtgcaacatccgggcaaacgtctggtggtgaccggatttatcagccgcaacaacgccggtgaaacggtgctgctggggcgtaacggttccgactattccgcgacacaaatcggtgcgctggcgggtgtttctcgcgtaaccatctggagcgacgtcgccggggtatacagtgccgacccgcgtaaagtgaaagatgcctgcctgctgccgttgctgcgtctggatgaggccagcgaactggcgcgcctggcggctcccgttcttcacgcccgtactttacagccggtttctggcagcgaaatcgacctgcaactgcgctgtagctacacgccggatcaaggttccacgcgcattgaacgcgtgctggcctccggtactggtgcgcgtattgtcaccagccacgatgatgtctgtttgattgagtttcaggtgcccgccagtcaggatttcaaactggcgcataaagagatcgaccaaatcctgaaacgcgcgcaggtacgcccgctggcggttggcgtacataacgatcgccagttgctgcaattttgctacaccagtgaagtggccgacagtgcgctgaaaatcctcgacgaagcgggattacctggcgaactgcgcctgcgtcaggggctggcgctggtggcgatggtcggtgcaggcgtcacccgtaacccgctgcattgccaccgcttctggcagcaactgaaaggccagccggtcgaatttacctggcagtccgatgacggcatcagcctggtggcagtactgcgcaccggcccgaccgaaagcctgattcaggggctgcatcagtccgtcttccgcgcagaaaaacgcatcggcctggtattgttcggtaagggcaatatcggttcccgttggctggaactgttcgcccgtgagcagagcacgcttagcgcacgtaccggctttgagtttgtgctggcaggtgtggtggacagccgccgcagcctgttgagctatgacgggctggacgccagccgcgcgttagccttcttcaacgatgaagcggttgagcaggatgaagagagcttgttcctgtggatgcgcgcccatccgtatgatgatttagtggtgctggacgttaccgccagccagcagcttgctgatcagtatcttgatttcgccagccacggtttccacgttatcagcgccaacaaactggcgggagccagcgacagcaataaatatcgccagatccacgacgccttcgaaaaaaccgggcgtcactggctgtacaatgccaccgtcggtgcgggcttgccgatcaaccacaccgtgcgcgatctgatcgacagcggcgatactattttgagcatcagcgggatcttctccggcacgctctcctggctgttcctgcaattcgacggtagcgtgccgtttaccgagctggtggatcaggcgtggcagcagggcttaaccgaacctgacccgcgtgacgatctctctggcaaagacgtgatgcgcaagctggtgattctggcgcgtgaagcaggttacaacatcgaaccggatcaggtacgtgtggaaagcctggtgcctgctcattgcgaaggcggcagcatcgaccatttctttgaaaatggcgatgaactgaacgagcagatggtgcaacggctggaagcggcccgcgaaatggggctggtgctgcgctacgtggcgcgtttcgatgccaacggtaaagcgcgtgtaggcgtggaagcggtgcgtgaagatcatccgttggcaagtctgctgccgtgcgataacgtctttgccatcgaaagccgctggtatcgcgataaccctctggtgatccgcggacctggcgctgggcgcgacgtcaccgccggggcgattcagagcgatatcaaccggctggcacagttgttgtaatttcagaaatttaataatgcccggtactcatgttttcgggtttatggtttctaatgaaatatattgaattatcataggattaggccggattaagcgtttacgacgaatccggcaagaagcaataagtacatggttagtttatatttgcagtccggtttgctttgcataccggattttctttttcttaccatcctgaagttttttcatcttccctgatttttcctcaccatcattggtcatttttcggttgacgcccttcggcttttccttcatctttacatctggacgtctaaacggatagatgtgcacaacacaacatataactacaagcgattgatgaggtaaggtatgagcttttttcacgccagccagcgggatgccctgaatcagagcctggcagaagtccaggggcagattaacgttagcttcgagtttttcccgccgcgtaccagtgaaatggagcagaccctgtggaactccatcgatcgccttagcagcctgaaaccgaagtttgtaagcgtgacctatggcgcgaactccggcgagcgcgaccgtacgcacagcattattaaaggcattaaagatcgcactggtctggaagcggcaccgcatcttacttgcattgatgcgacgcccgacgagctgcgcaccattgcacgcgactactggaataacggtattcgtcatatcgtggcgctgcgtggcgatctgccgccgggaagtggtaagccagaaatgtatgcttctgacctggtgacgctgttaaaagaagtggcagatttcgatatctccgtggcggcgtatccggaagttcacccggaagcaaaaagcgctcaggcggatttgcttaatctgaaacgcaaagtggatgccggagccaaccgcgcgattactcagttcttcttcgatgtcgaaagctacctgcgttttcgtgaccgctgtgtaagcgcgggcattgatgtggaaattattccgggaattttgccggtatctaactttaaacaggcgaagaaatttgccgatatgaccaacgtgcgtattccggcgtggatggcgcaaatgttcgacggtctggatgatgatgccgaaacccgcaaactggttggcgcgaatattgccatggatatggtgaagattttaagccgtgaaggagtgaaagatttccacttctatacgcttaaccgtgctgaaatgagttacgcgatttgccatacgctgggggttcgacctggtttataaatagtgtggcttttgtgaaaatcacacagtgatcacaaattttaaacagagcacaaaatgctgcctcgaaatgagggcgggaaaataaggttatcagccttgttttctccctcattacttgaaggatatgaagctaaaacccttttttataaagcatttgtccgaattcggacataatcaaaaaagcttaattaagatcaatttgatctacatctctttaaccaacaatatgtaagatctcaactatcgcatccgtggattaattcaattataacttctctctaacgctgtgtatcgtaacggtaacactgtagaggggagcacattgatgagcacgagtgacgatatccataacaccacagccactggcaaatgcccgttccatcagggcggtcacgaccagagtgcgggggcgggcacaaccactcgcgactggtggccaaatcaacttcgtgttgacctgttaaaccaacattctaatcgttctaacccactgggtgaggactttgactaccgcaaagaattcagcaaattagattactacggcctgaaaaaagatctgaaagccctgttgacagaatctcaaccgtggtggccagccgactggggcagttacgccggtctgtttattcgtatggcctggcacggcgcggggacttaccgtagtatcgatggacgcggtggcgcgggtcgtggtcagcaacgttttgcaccgctgaactcctggccggataacgtaagcctcgataaagcgcgtcgcctgttgtggccaatcaaacagaaatatggtcagaaaatctcctgggccgacctgtttatcctcgcgggtaacgtggcgctagaaaactccggcttccgtaccttcggttttggtgccggtcgtgaagacgtctgggaaccggatctggatgttaactggggtgatgaaaaagcctggctgactcaccgtcatccggaagcgctggcgaaagcaccgctgggtgcaaccgagatgggtctgatttacgttaacccggaaggcccggatcacagcggcgaaccgctttctgcggcagcagctatccgcgcgaccttcggcaacatgggcatgaacgacgaagaaaccgtggcgctgattgcgggtggtcatacgctgggtaaaacccacggtgccggtccgacaagtaatgtaggtcctgatccagaagctgcaccgattgaagaacaaggtttaggttgggcgagcacttacggcagcggcgttggcgcagatgccattacctctggtctggaagtagtctggacccagacgccgacccagtggagcaactatttcttcgagaacctgttcaagtatgagtgggtacagacccgcagcccggctggcgcaatccagttcgaagcggtagacgcaccggaaattatcccggatccgtttgatccgagcaagaaacgtaaaccgacaatgctggtgaccgacctgacgctgcgttttgatcctgagttcgagaagatctctcgtcgtttcctcaacgatccgcaggcgttcaacgaagcctttgcccgtgcctggttcaaactgacgcacagggatatggggccgaaatctcgctacatcgggccggaagtgccgaaagaagatctgatctggcaagatccgctgccgcagccgatctacaacccgaccgagcaggacattatcgatctgaaattcgcgattgcggattctggtctgtctgttagtgagctggtaagcgtggcctgggcatctgcttctaccttccgtggtggcgacaaacgcggtggtgccaacggtgcgcgtctggcattaatgccgcagcgcgactgggatgtgaacgccgcagccgttcgtgctctgcctgttctggagaaaatccagaaagagtctggtaaagccagcctggcggatatcatagtgctggctggtgtggttggtgttgagaaagccgcaagcgccgcaggtttgagcattcatgtaccgtttgcgccgggtcgcgttgatgcgcgtcaggatcagactgacattgagatgtttgagctgctggagccaattgctgacggtttccgtaactatcgcgctcgtctggacgtttccaccaccgagagtctgctgatcgacaaagcacagcaactgacgctgaccgcgccggaaatgactgcgctggtgggcggcatgcgtgtactgggtgccaacttcgatggcagcaaaaacggcgtcttcactgaccgcgttggcgtattgagcaatgacttcttcgtgaacttgctggatatgcgttacgagtggaaagcgaccgacgaaagcaaagagctgttcgaaggccgtgaccgtgaaaccggcgaagtgaaatttacggccagccgtgcggatctggtgtttggttctaactccgtcctgcgtgcggtggcggaagtttacgccagtagcgatgcccacgagaagtttgttaaagacttcgtggcggcatgggtgaaagtgatgaacctcgaccgtttcgacctgctgtaatctgaccccgttcagcggctgcttgctggcagtcgctgaacgttctttaccagcgtatagtgggcgaacgaaaactacacactggatctctcatgtctgccgcaggaaagagcaacccactggcaatcagtggcctggttgtgctcacacttatctggagttatagctggattttcatgaagcaagtcaccagttacatcggtgccttcgactttaccgccttacgctgcattttcggcgctctcgttttattcatcgtccttttattacgtggtcgcggaatgcgcccgacaccgtttaaatacaccttagccattgccctgttacaaacctgcgggatggttggtctggcgcagtgggcgttggtcagcggaggtgcggggaaggtggcgatcctgagctataccatgccgttctgggtggtgattttcgccgcgttgtttctcggtgaacgcctgcgacgtgggcaatatttcgcgattctgattgccgctttcggcttatttttggtgttgcagccgtggcaactcgatttctctagcatgaaaagtgccatgctggcaatcctctccggcgtcagttggggggcgagcgcgattgttgctaaacgtctgtatgcccgtcatccgcgcgtggatttattgagcttaacatcctggcagatgctgtatgcggcgctggtgatgagtgtggtcgctttactggtgccgcaacgtgaaattgactggcagcccaccgtgttctgggcgctggcctacagtgcgattctggcgacggcactggcgtggagcttatggttgtttgtattgaaaaacttgcctgccagtattgccagcttaagcacactggccgttcccgtttgcggcgtactcttttcctggtggctgctcggcgagaatccgggggccgttgaaggtagcggtattgtgctgattgtgctggcactggcgctggtgagccgtaagaaaaaagaagccgtcagtgtaaaaaggatctgaattttttcttcatgtggggcgatctcttatttaacaaaataacgataatgccccaccatccgccagttaaacagcacatcttcttcctgcgcgcctgcgccaatgttatgtatcaccagcggcgtaccgtcgcgggcgaagccatcactaaccaccccaatatgtgccagcccgttatccagtcgccaggagacaatatcgcccgcttgatagtcactggggttcttgctggtggggcgtgttttatcatggcggctaaaccaggtttccagattaggcacccgacggtgatcgatgttgctgtccgggcgctttaacttccatttttgcgggtactcagcaaaattcttcgccatatcttcgtgaaccagtttctgcaaatcgaccttctggctgcgcaatgcgcggatcaccacatcggaacatacaccgcgttcttgcggaacatcaccgccaggataagtaagctgcacatacgccggatcgtaaaatagcgtgctgccaatttgctgtctggcaccgtctgcgatggcaaggttggtattggcctggatttgtaccacggttggtggaacggcgggagattttaaggagtggctggtaaatgccgttagcaggctgagcagcgccagactagctttcatctggttcgtccgtgaaaataagagtcacagattcgaccttccgggctaacgattgttctgtagagaaaatgtccagaagcggataaaaaattcctgaacaacgtgggagtttcagattactggcacagagtgccggatgcggagtgaacgccttatccggcctacaaaagcacgcaaattcaatatattgcagagattgcgtaggcctgataagcgtagcgcatcaggcaattttgcgttcaaactcccggacaagccgggagtttggagtaggttattcccactcttgcaggaaacgctgaccgtactggtcggctaccagcagagcggcgtaaacctgatctggcgtcgcgccgccaggcatgttgtgaatggtttcaccttctgcacatgccgcttctgccacaattcgcattttcgccgggacatcttctttaatatccagttgagcgagagttattggcaaacctaccgcatggctaagggcagctacggtttcgatttcctccaccggcgcattttccagaaccagctgcgtcagcgtaccgaatgccactttttcaccgtgataatagtgatgcgcgtccgggatagcggtcaggccgttatgcactgcgtgcgccgcagccagaccaccactttcaaaaccaacaccgctcaaataggtgttcgcttcaatcacgcgctccagcgccggagtcactacatgctgttcggcagcaagcatcgctttttcgccttcttccagcagggtgttgtagcacagttcagccagtgccagcgcagcctgggtgcacttgccgcccgccatggtggtcgcgccgctacgagagcaggcacgcgcttcaaaccaggttgccagcgcatcgccgatacccgccgctaacagacgtgcaggtgcgccagcgacgattttggtgtcgacaatgaccatattcgggttatttggcaacagcagatagcggtcaaactcaccctcatcggtgtagataacagacaatgcgctgcacggtgcatcggtagaggcgatagtcggtgcgatcgctaccggaacacccatgaaatgtgccagtgctttggcagtatcgagggtttttccgccaccgataccgagaattgcgccacactgcgcagtctccgcgatgccacgcagacggtcgatctcattttggctacattcaccgccaaacggcgcaatttctactaccagtccagcatctttaaagcttttctcgacagtggattgagcaaaacctaaaacaaatttgtcacccaccactaaccagcgttctgccagcggcttcaggtattcgcccagacgattaatcacatcagcgccctggatgtatttacccggactttgaataatgcggtccataattgctcctttagagatgagtagtgccaaatgcggcattccagtcgtgttcgaacttctctatagcactctctaccgcaggggtgttgagcatttgttgcgctacatctaagggcagggtgatggattcacatcctgccagtaaacagtccagcgcctgacgcggcgttttaaagctggctgccagcaccatgctttctggcgcgtgcatttctaacagcgtttgcagctcctgaaccgtacgaatgccgtctccgccctgggcatctacgcggttaacatacggagcaacgtattttgcccctgccagtgcggctaataacccttgtgcggcgctatatacagcagtgccaagtgtagtaataccctcttttttcagtattttaattgctgccagaccttcggaagtcaccgggattttcaccacaatacccggaatagcgtcgcgcaggcgcttcgcttcttccaccatcccctgcgcgtcgcggctcatggtctgagcaaacagaatgccctcatcaccaatcgctttttgcagacgcggcagcacttcccatatggactccttgctggcagcgataatgctcgggttagttgtcaccccggcaatggggaatatgcgtgccagacgttcgacttctgcgacgttagcggtgtccagatacagttccatgatgtttccttttacagttccagttcatgttgcagcaggctggcgatagcgtcggcagaggcggcgttaaccagcgcgttacggaattcttcgtgcatgatgcggcgagcgaggcggctgaaaatgcgcatatgctgatcgcccgcagcgtgtttgttcagggttaacataatgatgaattgcgcttcatcatcgccccagcgcaccggcgcttgcagacgcgccacgctgatggtggattgctcaatgtgttcacttttgctgtgtggaatggcaaaactaaagcccagaccggtagagaaaacggcctcgcgcgcccacaagtcggcttccagtttacgcggatagcggcagcggcccgccagcagcaggttatcggtcatgcctttgagcacttcttctttgctgcgccagtcgctttccagtgtgatgcactcggcggtgaccagcggtgcgtcttgttgggtcatgcggaattgcgccagcaggtgttctacttccaggctagtacggcaggccattgcctggttgagcaacttgcggcactcacggctatcaagttgcgccatccgagctttcgccgccggaatacttggtgcgctcatgctgagttcatccagccctaagccgaccagcaacggcagcacggaacctttcgctcccagctcaccgcacagaccaatccatttgccctggcgatgcaccgcttgcacggcgtaatcgagcgcccgcaagaatgccggattcaggctgttgtagtgacgagtaaccttagcgttatcgcgatccaccgccagcagatactgcgtcaggtcattactaccaatactaaagaaatcaatctcttcgcagcattgatcgatgatgaacatcacgctcggcacttccagcatgatgccgagctggattttctcatcaaacggaatgtgttcgttacgtagttgctgtttggcttccgccagtttttctttcacccataagatctcttccatactggagatcatcgggatcatgattttcaggctgccgtgagcggaggcgcggaggatgctccgtagctgcgtggtaaacaagctcgcgtactcttcataaatacgcacggcgcgataaccgaggaacgggtttgcctctgcgggaatgttcagataatcaacgggtttgtcgccgccaatgtccatagtgcgcacaataatgctgcgtccgttggcggattccagcgcctgacaaaaaatgttgtacaactcgctttcgcccggtgcgctggtgcgatccatatagagcatttcagtgcggaacaaaccaacgccttccgcaccattgccgaatgcggcctgcgcttccacggagtgagcgatgttagcggcaatttcaatgcggataccgtcagcggtacgggcttgttgggtcagccagacacgctgttgctcacgcagggcgtcctgtacgcgggcttcttgctgataataacgagctacggcttcccctggctcaaccacaatcgccccggcgttgccgtcgatataaatcgtttgttgctgccacggagtaagggcatcaatatccacaccaaccagcgttggaatgttgaagctacgggcaaggatcaccgtatgactggtggtgccgccgcttttgagcaacaatcctttgaggtgatttttatccagttcgaggaactggctgggggtcagttcatcagccatacaaatggcgggctgcgtcagtttgcccggtgccgggaagcgttgctcaccgtagatttgctggagtaactggaagcagacgtcgcgtacgtccagggcacgttcttgcaggtagctgctgctggaacgggaaaactcttcgcaaaagtgattcgcgctggcaacaattgcttcggcgcagcttaatccggcgctgacgcctgccagtaaatgttcgcgcagggaagtatcgccagccagggatcggtgagcttccagaatcgcgctggtagcaccgtcgctatccagcagacgaaactcaatgtttttcagtaccagcgtcaggccgttttccagtgcggattgctcggcgtcaacgcctttggctgcgggaagattacccagcgcattgagatctaaagaagagatcggcgtcagaatgccgcctgcactaccgctgcacacggtgcgggcgcggataatttgcggattcagattggtcagactaaccggcagtggttccagttcgtcagatttaacttccgccagcggcgcatcgcagtgggggaattcatcgcgcagccattggcttaaacgctggtgcgcttcctgttcgtcggccccggaaatcagtaactggcagttatcgcccgccagcgtatcggtgccaatcagcgcaagggcgcttttggcgttgcccttgcggtcagtgcgcaggttatgccactcaatttgactactaaaagtattacacagcgtttcaacgtggcttgccggacgcgcatgtacgccgttaggtagctcacaaataaattccacaatcagggccattgcctctctcccggtacggttttctgtttacaggataagagcgcacggcaacggcctgccatgtgacaaatctgccaaaagctggacaaatgtaatgtaaccgtcaatttgcgacgcgtctcacaagacgctgttttgcggcatgcttccggtttatcgcaagttatgaggcggatcgcatttttgtactgatattacaaaagtccagtaaatggcctttttatccactgtttgctccgcctgcgattgcctattgtttcctccatcaaaaatatggacatgggctttcgcaagcccgggagcagcttatgaatgagttggtgcagatcctgaaaaatacccgtcagcatttaatgacgggcgttagtcacatgattcccttcgtggtaagcggcggtattttgctggcggtttccgtcatgttgtatggcaaaggcgcagtgccggatgccgtagccgatccaaatctgaaaaaactgtttgatatcggcgttgcgggcttgacgctgatggtgcctttcctcgcagcgtacatcggttattccattgcagagcgttctgcgctggctccgtgcgctatcggtgcctgggttggtaacagctttggtgcgggcttctttggtgcactgatcgccgggattatcggcggcatcgtggtgcattacctgaagaaaattccggtgcataaagttctgcgcagcgtgatgcctatcttcattattcctatcgtcggcacactgattaccgcaggcatcatgatgtggggcttgggcgagcctgtaggggcgttgaccaacagcctgactcagtggcttcaggggatgcagcagggcagcattgttatgctggcggtgatcatgggtctgatgctggcgttcgatatgggcggtccggttaacaaagtggcctatgccttcatgctgatttgcgttgctcagggtgtttataccgtggtggccatcgctgccgtgggtatttgtatcccgccgctggggatggggctggcgacgctgattggtcgtaaaaatttctccgcagaagagcgcgaaaccggcaaagcggcactggtgatgggctgtgttggcgttactgaaggggcgattcctttcgccgctgccgatccgctgcgtgtcattccttccatcatggtcggtagtgtttgtggtgcagtaactgcggcgctggtcggtgcgcagtgctatgcaggctggggtggtctgattgtgctgccggtggttgaaggcaagctgggttatatcgcagcagtggctgtcggagcagtggtgacggctgtttgtgtgaacgtgctgaaaagtctggcgcgtaaaaatgggtctagcactgatgaaaaagaagacgacctggatttggattttgaaattaattaattgaggaacgagccatgacgaaaattattgcagtaaccgcatgtcctagtggtgttgcccatacctatatggcagcagaggcgctggaaagtgccgcgaaagcgaaaggctgggaagtgaaagtagaaacccaggggagtattggtctggaaaatgaactgactgcggaagatgtggcgagcgctgatatggtgattctgaccaaagatatcggcatcaagtttgaagagcgttttgctggcaagaccatcgtgcgcgtcaacatcagcgatgcagtaaaacgtgctgacgccattatgagcaaaattgaagctcacctggcgcaaaccgcttaagttcttctcccgctcgcaagggcgggttcgctttcccacaggagttcctcatgacgaatcgtatctctcgcctcaaaactgcactgtttgccaatacccgtgaaatcagcctggagcgggcgctgctttataccgccagccatcggcaaaccgaaggcgaaccggtgatattgcgccgggcgaaagcaacagcgtatatccttgaacatgttgaaattagcattcgtgatgaagaactgattgccggtaaccgcaccgtaaaaccgcgcgccgggattatgagcccggaaatggacccttactggctgctgaaagagctggatcaattcccgacgcgtccgcaggaccgctttgctatcagcgaagaagataaacgtatctaccgtgaagagttgttcccgtactgggaaaaacgtagcatgaaagatttcatcaacgggcagatgacagatgaagtaaaagccgcgaccaacacgcagattttcagcatcaaccagacggataaaggccaggggcacattattattgattacccacgcctgttgaatcacgggctgggtgagctggtggcacagatgcagcaacattgtcagcaacagccggagaatcacttttatcaggccgcgttgttactgctggaagccagccagaaacacattttgcgttacgccgaactggcggaaacgatggcggcaaactgcacagatgcccagcgtcgcgaagagctgctgactattgcagagatctcccgccataacgcgcaacataagccgcagacgttctggcaggcgtgccagttattctggtacatgaacatcattctgcaatacgaatccaacgccagtagcctaagcttggggcgcttcgaccagtatatgttgccgttctatcagacaagtttaacccagggcgaagatgcggcgttcctgaaagaactgctcgaatctttatgggtgaaatgcaacgacatcgtgctgttgcgctccaccagtagcgcgcgttatttcgccggtttcccgaccggctataccgcactgctcggcgggttaaccgagaacggacgtagcgcggtgaacgtgcttagcttcctttgccttgacgcctatcaaagcgtgcaattaccgcaaccgaacctcggcgtgcgcactaacgccttgatcgacacgccgttcctgatgaaaaccgccgaaaccattcgcttcggtaccggtattccgcaaatctttaacgatgaagtggtggtgccagcgttcctcaaccgtggcgttagcctggaagatgcgcgcgactattccgtagtgggctgtgtggaattatctattcccggcagaacctacggcttgcatgacatcgcgatgtttaatctgctgaaagtgatggaaatctgcctgcatgaaaatgaaggcaatgctgcgctgacttatgaaggtttactggagcagatccgcgccaagatcagccactacatcaccctgatggttgagggcagcaatatttgtgatatcggccatcgcgactgggcacctgtaccgctgctcagtagctttatcagcgattgtctggaaaaaggccgcgatattaccgatggcggcgcgcgttataacttctccggcgtacaggggatcggtatcgccaacctgagcgattctctccatgcgttgaaagggatggtttttgagcaacagcgtttaagttttgacgaattgctgagcgtattaaaagccaacttcgcaacgccagaaggcgaaaaagtccgcgctcgcttaattaaccgcttcgagaaatacggtaacgatatcgacgaggtggataacatcagcgccgaactgttgcgccactactgcaaagaagtggaaaaataccagaacccgcgcggcggctacttcacgccgggaagctataccgtttctgctcacgtcccgttgggaagcgtggttggcgcgacgccagacggtcgttttgccggagaacagctggcagacggcggcttgagtcccatgctgggccaggacgcacaagggccaacagcggtactgaagagtgtcagtaagctcgataacacgctgctgtctaacggtacgttgctgaacgtgaaattcactccggcgaccctggaaggtgaagcaggattacgcaaactggccgacttcttacgggcgtttacccagcttaagttacaacatattcagtttaacgtggtgaacgccgacacgttgcgggaagcgcaacagcgcccacaagattatgccgggctggtggtgcgcgttgccggatacagcgccttctttgtcgaactgagcaaggagatccaggatgacatcatccgccggacagcgcatcagctgtaattaaactgtcgaaggagatccaggatgacaagttccgccggacagcgcatcagctgtaacgttgtggaaacgcgccgcgatgatgtggcgcgcattttcaacattcagcgttatagtctgaatgacggcgagggcattcgtacggtggtcttttttaaaggctgtccgcatctttgcccgtggtgtgctaatccggagagcatctccggcaaaatccagacggtacgcagagaggcgaaatgtctgcactgtgcgaaatgtttgcgtgatgcggatgaatgcccctccggggcgtttgaacggattggtcgcgatatcagccttgacgctctggaacgggaagtgatgaaagatgacattttctttcgcacgtccggcggcggcgtcacgctttctggcggcgaagtgttaatgcaggcggagtttgctacccgttttttacagcgactgcggctgtggggtgtgagttgcgccattgaaactgccggagacgcaccagccagcaagctattaccgctggcgaaattgtgcgatgaagtgttgttcgatttaaaaattatggacgcgactcaggcgcgggatgtggtgaagatgaacctgccacgcgtgctggagaatctgcgtttgctggtgagtgagggcgtcaacgtgatcccgcgtttaccgctgatccctggtttcacgctcagccgggagaatatgcagcaggcgctggatgtactgatcccgctgaatatcaggcagatccatctgttaccgtttcatcagtacggcgaaccgaaataccgcctgctggggaaaacatggagcatgaaagaggtgcctgcgccgagcagtgctgatgtggcaacgatgcgcgaaatggcagaacgggccggacttcaggttaccgtgggaggttaaaatggcatacctggtggcagtaaccgcctgcgtaagcggcgtggcgcatacttatatggcggcggaacggctggaaaagttgtgcctgttagagaagtggggagtcagcattgaaactcagggcgcgctgggaacggagaatcgtttagcggatgaggatatccgccgggcggatgttgctctgttgattacggatatcgagcttgccggtgccgagcgatttgaacattgccgctatgtgcaatgcagcatctacgcattcctgcgtgagccgcagcgggtaatgagcgcggtgcgcaaagtgctttctgcgccgcagcaaacccatcttattctggagtaattattctggagtagtcggtttttctgtcagttggctgtggtactgccggcgatattcgctcgggctgcgttcggtgtttttacgaaacagacggcagaagtagttgctgtcgacaaagccgcaggcgtgcgccacttcttttaccttcaggtcatagcctttcaataacgtcttagcgtgctccagtcgcgtgtgattcaggtattcgttaaaaccaatggcccccgttttttgaaacaggtggctgaggtaatttgggctaatataaaacgcctgtgcaacagattcgcgggtaagcgcggaggcatagcgttcgtcgatataatcgcgaatagcttcaaatagtgcctggctgcgactggcggtctggatttggctgccaagcaaatcgcggcagtggctaagcaggctggcgacgataagccttgccgtttgctgctcctgcggctgcatttgcatttcattgagcgtttgtagcagaaaagaacctatgcgtgggccgcgtcgggcgacgtgttgcttcgccagattttgatattgtttgccatcccattgcacgacgctgaagccgagttgctgtttgccaaacagcacgctaaaggtagtagcgggggcttgccattgtggaaaattccagccaccagcaggaacgtacagcacatcgccgggaactaacgttgctccagcgccggtatcaacaaactcaccttccagcacaatttccagccgtggaaaatcgacctgatacgcaagatcgggcaccgggccgttactgctggcaaagtaaatctggcgcagggacagcgggccgttgatcaggcgggagagcagatagctgacgtcgtgatacatgttattcccttaggtatgtagacgggaaaacagtaactggcattattaaaaaaggccacctgaaaagtgtggcctgaggggagttcgatgtaaacattgcggcagttgtattgccggatgtggcgtaaacgccttatccagcctaccgccgcgatctgtaggccggataagacgcgtcaagcgtcgcatccggcaaatagcgcctggctgataattactgattacccacctgatcgccatagggcagtgtgtcgtaatcgatcagtgcgtttttcttatacgggttaccaatccagcgggtagtttctttgaactgcggattcaccacactacgggttggatcgtaaccgtcgtaagataagcccgccaaatcactccaggtgtggatcagttccgccaggctgtatttacgatcaacatcctggctgaaatcacggggatgagtcgcttgccatttttcactcgtccacagcaggaacggaatggtgtacatatgacgcgtcgggttgtcctcattacgcccctgagttttgtgcggcggcgtgtcgtaaacctcttcaccgtggtcagagaaataaaccaggaaaccgttcgggtttgctgctttaaagtctttaatcaggctggcaaccacatgatcgttatacaggttagcgttgtcataatcgttataactctccagctcttccgcgtttaatcccggcggaacatgatcggtattgccatcaaacttgccctgattttccgggtagcggtatttgtatttgatatgcgtacccagcagatgaacaatgatcagtttcttcggcgcagggtcattcagcacttcctggaacggcttcagcacgttggtgtcgtattcacgcgcactctgcgtacgttgctggttcatgtagtactgcttgtcggtctggcggctaaataccgtcagcatggtattgcgggcggtcatcgtctgctggttggtgatccagaaggttttataacccgcctgtttcatcatgttcatcaggctcggctgcgtcagatacagatccgggttcttttcattggcaaaggtcagcgcctgttgcaggatttcaatggtgtacggacgagacgtaactacgttattaaacacggtcagattcggatcggttttatgcagcgcatccagctccggcgtggtttcacgcggataaccgtacagactcatgcgtccgcgctgggtgctctcgccaatcaccagcactaaagtgcgcggttcgttaccgctttcatctttgaaattagccagtggcggcaaggcattattttcattcagtaactttgttaggctgtttagttgctgacgatactgataatagccggtcaggaattgccacggtgcggcaggctccatacggctggccaggttatccaacgttttctcaaacggcttgtttttgataaacgtattcatggcgatcggatgcagaatcaagccataaagcagggcaaaagagacaacataacgccacggctttggaatatagaccgggcgcaggcgtgtccacagcagaactgccaccgccgtataggccagcgcgataagcacaattttcaggctgaaatactggcttaaatactcgctggcttcgttggtgttggtttcgaacatcacaaacagaacgctctggctgaactcctgaccgtagatgacgtagtagcacagcgccgccagagaggccgcccatagcaccacgccgattactgcggcaataattttaatccgcttcggaaagaggaataccgggatcaaccacaggctactgaataacaggctgtcgcgaatgccgttagtgccactataaccactgatgtaaataatggcctgtagcagagtagagaaaaaccaaaagtagagcagtgcccaacccagggctttccagctaaaaagaggtttagcctggacttctgtggaatgcatagtaagaacctgtcttgaaaaaatatcgccgaatgtaacgacaattccttaaggatatctgaaggtatattcagaatttgaataaaatgcagacagaaatatattgaaaacgagggtgttagaacagaagtatttcagaaaaccctcgcgcaaaagcacgagggtttgcagaagaggaagattagccggtattacgcatacctgccgcaatcccggcaatagtgaccattaacgcttgttcgacgcgaggatccggttcctggccttctttttctgcctggcgggagcggtgcagcaactcggcctgcaatacgttcagcgggtcggtgtaaatattccgtagctgaatagactctgcaatccacggcagatcggccatcagatgggaatcgttggcaatcgccagcaccactttgatgtcttcttcttgcaggttgcgtaactctttacctaacggccacagtgctttgtctaccaggcgttggtcatagtattccgccagccacaggtctgctttggcgaagaccatctccagcatgccgagacgcgtgctgaagaatggccaatcgcggcacatagcctccagctcgctctgtttgccgtcttcgaccactttttgcagcgccgtacctgcacccagccaggcggggagcatcagacggttttgcgtccaggcgaagatccacggaatggcgcgtagactctcgacgccgccggttgggcgacgtttcgccggacgactacccaacggcagtttgcccagttcttgttccggcgtagcggagcggaagtaaggcacaaaatctttgttttcacgtacgtagccgcggtagacatcgcaggagatgacactcagttcatccataatgcgacgccagctctctttcggctccggcggtggcagcaggttggcttccagaatcgccccggtataaaggctcaggctgctgacggtgatttctggcagaccatatttaaagcggatcatctcgccctgttcggttacgcgcaggccgcctttcaggcttcctggcggttgactcagcagcgccgcatgagcaggtgcgccgccgcgaccaatggaaccgccgcgaccgtggaacaacgtcagctcaatacccgctttttcgcaggttttgattaatgcatcctgtgcctgatattgcgcccaggaagctgccatcactcccgcatcttttgcactgtcggaatagccaatcatcaccatctgtttgccctgaatcaggccacgataccagtcaatattgagcagctgggtcatgacatcgttggcgttgttcagatcatcgagggtttcaaacagcggagcaaccggcatcgcaaacccgatacccgcttctttcagcagcaggtggacagccagtacgtcggacggcgttttcgccatgctgatcacgtaggcggcaatggagccttgcggtgcttcggcaatcacctggcaggtatcgagcacttcgcgcgtttcggcgcttggttgccagttgcgcggcagaagcggacgtttggagttcagttcgcggatcaggaacgcctgtttgtcggcctcactccagctttcgtagtcgccgataccgaggtagcgggtcagctcgcccagcgcttcggtatgacgcgtgctctcctgacggatatcaatacggaccagcggtacgccgaaacatttcacgcggcgcagggtgtcgagcagatcgccgttggcgataatacccatgccacacgcctgaagactctggtagcaagcgtagagcggttcccacagttcttcgttttgtgtcagcaggccttctggttttggcagttcttcgcctttcaggcgcgcttccagccatgcctgtgtcgccatcaggcgagaacgcaggtttttcatcagatagcgatacggttctgcggcaccttcttcgccaaccagcgccagcagttcaggggtcgcttcaaccatgctcagttcagaaaccagcacctgaatatctttcaggaacaaatcggtggctttccagcggctgagtagcaggacgtggcgggtgatatcggcagtgacgttcgggttgccgtcgcggtcgccgcccatccagctagtaaaacggaccggaacaaattcgacgggcagtttgtagccgaggttctcttccagttgttcgttcagttcgcgcaggtaatttggtacgccttgccacaggctgttttccactacggcaaagccccatttggcttcatctaccgggcttggacgcagcttacggatttcatcggtatgccaactctgggcgatcaactggcgcaggcgacgcatcagctggttgtgttcgtagtcagcgatatctttgttatcgagctgttttaaacaggcgttcacttccaccattttgtggatcagtgtacgacgggtaatttcggttgggtgagccgtgaggaccagttccaggctcaggctttccactgcttttttgatggtgtcttcgctcagttccggctggtttttcagtttacgcagggtgcgggcgatcacttccgggttgctggcagcttcgcctttcgggctaatgctgtggtattgctcggcggtgttggccaggttcaggaactgactaaacgcacgcgcaacgggcagcagctcgtcgttgctcaaattttgtaaggtggtgagcaactcctggcggttagcatcattgccagcgcgactagatttgctcaacttacggatagtttctacgcgttcaagaatgtgttctcccaacgcatccttgatggtttctcccagcactttgccgagcatactgacattactacgcaatgcggaatattgttcgttcatattaccccagacaccccatcttatcgtttgatagccctgtatccttcacgtcgcattggcgcgaatatgctcgggctttgcttttcgtcgtcttttataaagccacgtaaaagcggtgacgtcaaatgctgcgaaatcgcttcagcaaacgaataaatagcaggaatttacgtcattaaattcacgacgctttaaataagcgtaacttatggaaatgttaaaaaatcgccccaagtaacaccaaaggtgtaggtcggataagatgcgcaagtatcgcatccgacattattgcggcactggagtttggcaacagtgccggatgcggcgcgagcgccttatccggcctacagttgggcatcgtttgagtcactgtcggtcggataagatgcgcaagtatcgcatccgacattattgcggcactggagtttggcaacagtgccggatgcggcgcgagcgccttatccggcctacggttgggcatcgtttgagtcactgtaggtcggataagatgcgcaagcatcgcatccgacattattgcggcactggagtttggcaacagcgccggatgcggcgcgagcgccttatccggcctacgttttaatgccagcaaaaatggtgaattacctgggttatcagttcgcgggtgggcttgataaaccgtgtttccagatattcatcaggttgatgagcctgattaatactgccaggccccaacaccagcgtcgggcataacgtttgaataaacggcgcttcggtacagtagttcaccacttcggtttttgctccgagcaatttctcaaccacttcaaccagttgatgattcggtgggcattcatagccagggatcggcggatgcagctcgtcgaccgtcagacgacccggccagcgttcgctcaccggagccaatgcatcgttgagcaaaccattaagttcattgagtgtcatgccaggcagcggacgaatatccatatgcaactcacagcaagcgcaaatacggttagaagcgtcgccaccgtgaatatgcccgaggttgagcgtagggtatggcacggtaaacgcttcgtagtgataacgttctttcaggttatcgcgcaattgcaaaatatgcccgatggcgtcgtgcattagttcgatagcgttaactccgcgtgctggatcgctggagtgcccgctctggccctgaatacggatggcgttagagatatgacctttatgtgcgcgtaccggttgtagactcgtcggttcgccaatgatggcgcaatccgggcgcagggcggtagtttcggcaaaataacgcgctccggccatactggtttcttcatcagcagtcgccagaatgtagagcggttttttcagtttcgtgacgtcgacatcgcgtagcgcatcaaggataaacgcaaaaaagcctttcatgtcggcggtgcctaagccgtaaagcttgccgtcatgctccgtcagtgtaaacggatcgcgcgtccagcgaccgtcatcaaatggcaccgtatcggtatgccccgccagcaacaagccgccagccccctgtccgatacttgccagcatattgaatttgttgcgagttcctggaacaggctgcacttccacattgaagcccaaatctttaaaccagtccgccagcagagtgattaaatctgcattgctttgatcgagtgcctcttccgtggcgcttatactaggtgtggcaatcagagcgcggtaaatctcgataaatggcggtaatttgtttttcattgttgacacacctctggtcatgatagtatcaatattcatgcagtatttatgaataaaaatacactaacgttgagcgtaataaaacccaccagccgtaaggtgaatgttttacgtttaacctggcaaccagacataagaaggtgaatagccccgatgttgaatacgctgattgtgggtgccagcggctacgctggcgcagagctagtgacctatgtaaatcgccatccgcatatgaacataaccgctttgactgttagtgcgcaaagcaatgatgcgggaaagttaatctccgatttgcatccgcagctaaaaggcatcgttgatctgccgttgcagccgatgagcgatatcagcgagtttagcccaggggtggacgtagtgtttctcgccaccgcccatgaagttagccacgatttagcgccgcagtttcttgaagcgggctgcgtggtgttcgacctttccggcgcgtttcgtgttaacgacgccaccttctatgaaaaatattacggctttacccatcaatacccggaactgttggaacaggcagcctacggtctggcggagtggtgcggtaataaattaaaagaagcgaatttgattgcggtgccgggctgttatccgacggcggcacagctggcgctgaaaccgttgattgatgccgatcttcttgacctcaatcagtggccggtgatcaacgccaccagcggcgtgagcggtgcagggcgtaaagcggccattagtaacagcttttgtgaagttagcctgcaaccgtatggcgtctttactcatcgccatcaaccagagatcgccacacacctcggtgctgacgttatcttcaccccacatctgggcaatttcccgcgcggcattctcgaaaccattacctgccgcctgaaaagcggtgtgacccaggcgcaagtcgcgcaagtgttacagcaggcgtatgcccataaaccgctggtgcggctgtatgacaaaggcgttccggcgctgaaaaatgtcgttgggctgccattttgcgatatcgggtttgccgttcagggcgagcatctgattattgtggcgaccgaagacaacttactgaaaggcgcggcggcacaagcggtacagtgcgccaatattcgtttcggctatgcggaaacgcagtctcttatttaagggtgcaatgatgaatccattaattatcaaactgggcggcgtactgctggatagtgaagaggcgctggaacgtctgtttagcgcactggtgaattatcgtgagagtcatcagcgtccgctggtgattgtgcacggcggcggttgcgtggtggatgagctgatgaaagggctgaatctgccggtgaaaaagaaaaacggcctgcgggtgacgcctgctgatcagatagacattatcaccggagcactggcgggaacggcaaataaaaccctgttggcatgggcgaagaaacatcagattgcggccgtaggtttgtttctcggtgacggcgacagcgtcaaagtgacccagcttgatgaagagttaggtcatgttggactggcgcagccaggtagccctaagcttatcaactccttgctggagaacggttatctgccggtggtcagctccattggcgtaacagacgaagggcaactgatgaacgtcaatgccgaccaggcggcaacggcgctggcggcaacgctgggcgcggatctgattttgctctccgacgtcagcggcattctcgacggcaaagggcaacgcattgccgaaatgaccgccgcgaaagcagaacaactgattgagcagggcattattactgacggcatgatagtgaaagtgaacgcggcgctggatgcggcccgcacgctgggccgtccggtagatatcgcctcctggcgtcatgcggagcagcttccggcactgtttaacggtatgccgatgggtacgcggattttagcttaagttttgttggccggaggcgcagctttccggcattgaatttcaaaataaggaaacagagttatggcactttggggcgggcgttttacccaggcagcagatcaacggttcaaacaattcaacgacagtctgcgctttgattaccgtctggcggagcaggatattgttggctctgtggcctggtccaaagccctggtcacggtaggcgtgttaaccgcagaagagcaggcgcaactggaagaggcgctgaacgtgttgctggaagatgttcgcgccaggccacaacaaatccttgaaagcgacgccgaagatatccatagctgggtggaaggcaaactgatcgacaaagtgggccagttaggcaaaaagctgcataccgggcgtagccgtaatgatcaggtagcgactgacctgaaactgtggtgcaaagataccgttagcgagttactgacggctaaccggcagctgcaaagcgcgctggtggaaaccgcacaaaacaatcaggacgcggtaatgccaggttacactcacctgcaacgcgcccagccggtgacgttcgcgcactggtgcctggcctatgttgagatgctggcgcgtgatgaaagccgtttgcaggatgcgcttaagcgtctggatgtcagcccgctaggctgtggcgcgctggcgggaacggcctatgaaatcgaccgtgaacagttagcaggctggctgggctttgctagcgcgacccgtaacagtctcgacagcgtttctgaccgtgaccatgtgttggaactgctttctgctgccgctatcggcatggtgcatctgagccgttttgctgaagatctgattttctttaacaccggcgaagcggggtttgtggagctttctgaccgcgtgacttccggtagtagtttaatgccgcagaagaaaaacccggatgcgctggagctgattcgcggtaaatgcggccgggtgcagggggcgttaaccggcatgatgatgacgctgaaaggtttgccgctggcttacaacaaagatatgcaggaagacaaagaaggtctgttcgacgcgctcgatacctggctggactgcctgcatatggcggcgctggtgctggacggcattcaggtgaaacgtccacgttgccaggaagcggctcagcagggttacgccaacgccaccgaactggcggattatctggtggcgaaaggcgtaccgttccgcgaggcgcaccatattgttggtgaagcggtggtggaagccattcgtcagggcaaaccgctggaagatctgccgctcagtgagttgcagaaattcagtcaggtgattgacgaagatgtctatccgattctgagcctgcaaagctgcctcgacaagcgtgcggcaaaaggcggcgtcagtccgcagcaggtggcgcaggcgattgcttttgcgcaggctcggttagggtaagaacatttatatgtataaatttgagcctggcttatcgccgggcttttttatggcaaaaaaaagcggatcctggagatccgcaaaagttcacgttggctttagttattcgagttgagaaactctcgaaacgggcagtgacttcaagggttaaaagaggtgccgctccgtttctgtgagcaattatcagtcagaatgcttgatagggataatcgttcattgctattctacctatcgccatgaactatcgtggcgatggaggatggataatgaatattcgtgatcttgagtacctggtggcattggctgaacaccgccattttcggcgtgcggcagattcctgccacgttagccagccgacgcttagcgggcaaattcgtaagctggaagatgagctgggcgtgatgttgctggagcggaccagccgtaaagtgttgttcacccaggcgggaatgctgctggtggatcaggcgcgtaccgtgctgcgtgaggtgaaagtccttaaagagatggcaagccagcagggcgagacgatgtccggaccgctgcacattggtttgattcccacagttggaccgtacctgctaccgcatattatccctatgctgcaccagacctttccaaagctggaaatgtatctgcatgaagcacagacccaccagttactggcgcaactggacagcggcaaactcgattgcgtgatcctcgcgctggtgaaagagagcgaagcattcattgaagtgccgttgtttgatgagccaatgttgctggctatctatgaagatcacccgtgggcgaaccgcgaatgcgtaccgatggccgatctggcaggggaaaaactgctgatgctggaagatggtcactgtttgcgcgatcaggcaatgggtttctgttttgaagccggggcggatgaagatacacacttccgcgcgaccagcctggaaactctgcgcaacatggtggcggcaggtagcgggatcactttactgccagcgctggctgtgccgccggagcgcaaacgcgatggggttgtttatctgccgtgcattaagccggaaccacgccgcactattggcctggtttatcgtcctggcagtccgctgcgcagccgctatgagcagctggcagaggccatccgcgcaagaatggatggccatttcgataaagttttaaaacaggcggtttaaaccgtttaacgcagctacccgataggcttccgccatcgtcgggtagttaaaggtggtgttgacgaagtactcaatagtgttgccgccacctttctgttccataatcgcctgaccgatatgaataatttcggcagcgcgctcgccaaagcagtgaatacccagaatctcttttgtttcccgatggaacaaaattttcagcgtgcccacgttcatgccgacgatttgtgcgcgtgccagatgtttaaactgggcgcggcccacttcatatggcactttcattgcggtcagctgctgttcggttttgcccacagagctgatttccgggatggtgtaaataccggtagggatatcttcaatcagatgtgcggtggcttcgccttttaccagcgcctgcgcggcaatgcgcccctggtcataggccgcgctcgccaggctcggataaccaatcacgtcgcccaccgcgtaaacgtgtggctgtgcggtctgatacatgctgttgaccttcagctgtccgcggctgtcagtttctagcccaatgttctgtaacgccaggctatcggtattaccggtgcgaccgttggcatagagcaggcagtcagctttcagttttttaccgctcttcagatgcatgatcacaccatcgtcacagccttcgatcttctcgtactcttcgttgtgacgaatcactacgccactgttccagaagtgataggagagagaatcactcatctcttgatcgagaaatgccagcaggcgatcgcgggtgttgatcagatccacttttacatccataccgcggaagatgctcgcatattcacagccgatcactccagcaccatagataagtacatggcgcggttcgtggtgcatgctgagaatactgtcgctgtcgtaaatgcgtggatgggtgaaatcaacatctgttggatgatatggacgagagccgcaggcaataacaaatttttcagcggttagtgtttcaacgctgccgtccgggcaatccagcgccaacgtatgctcgtcaacaaagcgagcgtttccctgcaatatttcacagtgattacgttcgtaaaatccctgacgcatgcgcgtttgttgattaatcacgttatcggcatggttaaggatatcggcaaaagaagagcggagcagtcgggaatggtcgctgtaaagtgggttttgattgaattctataatgcggctgacggcgtgacggagagctttgctcgggatggtgccccagtgggtgcaaccgccgccaacattttgataacgctcgataactgcgacgcgcgcaccttgcttaaccaggcccattgcagcgccttcgccgccggggccggaacctattactatggcatcgtaatcgtaggaatgtggcatggtagggcttacctgttcttatacataaaagcaacagaatggtaacattttatcgcgggtaagccaattgatccccgtcatttatctggctatatcctgagcggcctttgctttgtctgtttcttacttttgccctgacgttttattggatttttatcgacgatactctccgtttaagcggcaggtttccgctgtacgtaaaagaaccggccaaagaattgcagtaaatatgttttattgcgttaccgttcattcacaatactggagcaatccagtatgttcattctctggtatagtgccagcagtacttttggcaaggatagtgacatcgtgatgggcgtaagagcgcaacaaaaagaaaaaacccgccgtagcctggtggaagccgcatttagccaattaagtgctgaacgcagcttcgccagcctgagtttgcgtgaagtggcgcgtgaagcgggcattgctcccacctctttttatcggcatttccgcgacgtagacgaactgggtctgaccatggttgatgagagcggtttaatgctacgccaactcatgcgccaggcgcgtcagcgtatcgccaaaggcgggagtgtgatccgcaccagcgtctccacatttatggagttcatcggtaataatcctaacgccttccggttattattgcgggaacgctccggcacctccgctgcgtttcgtgccgccgttgcgcgtgaaattcagcacttcattgcggaacttgcggactatctggaactcgaaaaccatatgccgcgtgcgtttactgaagcgcaagccgaagcaatggtgacaattgtcttcagtgcgggtgccgaggcgttggacgtcggcgtcgaacaacgtcggcaattagaagagcgactggtactgcaactgcgaatgattagcaaaggggcttattactggtatcgccgtgaacaagagaaaaccgcaattattccgggaaatgtgaaggacgagtaatgaaacaagcaaatcaagatagaggtacgctgctgctggcgttagttgctggcttaagcattaatggtactttcgcagcgctgtttagctccattgtgccattttctgtattcccgattatttccctggtgctgacggtttactgcctgcatcaacgttatcttaatcgcactatgccggtaggcttgccgggtctggcagctgcctgttttattctcggcgtactgctgtacagcacggtagttcgtgcggaatatccggatatcggctctaacttcttcccggcagtactctccgtcattatggtgttctggattggcgcgaagatgcgtaaccgtaagcaggaagttgctgagtaatcggtattatgccggatgctggcgcatccggcatgggttttacttcgcggtcagtaatacgccgcactccatatggtgcgtgtaggggaactgatcaaacagagccagacgttcgaccttgtgcgtctggcttaatgtttccagattcttgcataacgtttccgggttacaggagatgtacaaaatacgcggatacgcctgcaccattttctcggtttcactgtccagaccgctgcgcggagggtcgacaaaaatggtttcgcactgataactctttaagtcgatcccttgcaggcggttaaactcgcgcacaccattcatcgcctgagtaaattcttctgccgccatacgaataatttgtacgttatcaatatggttagctgcgatgttgtattgcgcagcagcaacgctcggcttagcgatttcggtggctaatacccgatcaaaattacgcgccagcgctaaactaaagttaccgttgccgcagtacagctccagtaaatcgcctttactgcctttggttacgtccagcgcccattccagcatctgaatattcatcgccgcgttcggctgggtaaagctgttttctacctgacggtagatcatctctttccctgcgaccggcagacgttcatcgatgtaatcctgatccagctcgattttggttttcgttgcccgaccaatcagatgcacattcagattctgcgcgcgcagtgcatcgcgcagggcctccgcttcctgacgccactcatcatccagcttcttatggtatagcagggaaaccaccgcctgattactcagtgtagtgaggtaatcaatctggaacaacttgtggcgcagaacgggattattacgcacacccgcaatcatcgccgtcatcaactggttgataagttcactggcggcggggaagctatccacgcggatgcggcttttggtttgttgatcgaaaatgatgtgatacaggtcatcgccatcgtgccagatgcggaactccgcgcgcatccggtaatgactgaccgggctgcgaaacacttccggaaccaggtcagaaaacggtgccatcatactttgcaaacgtaccactttttcggctaactgcgcttcatactgttctgttggaaggtgttcgggggtcatgatgtatcctgaaaaattaaagtacgcggcgattgtagggattgctcatcagatgtccagatcttgatgaattcctatttgtgagctacgtctggacagtaacttgttacaacctgtagcatccacttgccggtcctgtgagttaatagggaatccagtgcgaatctggagctgacgcgcagcggtaaggaaaggtgcgatgattgcgttatgcggacactgccattcggtgggaagtcatcatctcttagtatcttagatacccctccaagcccgaagacctgccggccaacgtcgcatctggttctcatcatcgcgtaatattgatgaaacctgcggcatccttcttctattgtggatgctttacaatgattaaaaaagctagcctgctgacggcgtgttccgtcacggcattttccgcttgggcacaggataccagcccggatactctcgtcgttactgctaaccgttttgaacagccgcgcagcactgtgcttgcaccaaccaccgttgtgacccgtcaggatatcgaccgctggcagagcaccagcgtcaatgatgtgctgcgccgtcttccgggcgtcgatatcacccaaaacggcggtagtggtcagctcagttctatttttattcgcggtacaaatgccagtcatgtgttggtgttaattgatggcgtacgcctgaatctggcgggggtgagtggttctgccgaccttagccagttccctattgcgcttgtccagcgtgttgaatatatccgtgggccgcgctccgctgtttatggttccgatgcaataggcggggtggtgaatatcatcacgacgcgcgatgaacccggaacggaaattagtgcagggtggggaagcaatagttatcagaactatgatgtctctacgcagcaacaactgggggataagacacgggtaacgctgttgggcgattatgcccatactcatggttatgatgttgttgcctatggtaataccggaacgcaagcgcagacagataacgatggttttttaagtaaaacgctttatggcgcgctggagcataactttactgatgcctggagcggctttgtgcgcggctatggctatgataaccgtaccaattatgacgcgtattattctcccggtagtccgttgctcgatacccgtaaactctatagccaaagttgggacgccgggctgcgctataacggcgaactgattaaaagtcaactcattaccagctatagccatagcaaagattacaactacgatccccattatggtcgttatgatagcagcgcgacgctcgatgagatgaagcaatacaccgtccagtgggcaaacaatgtcatcgttggtcacggtagtattggtgcgggtgtcgactggcagaaacagactacgacgccgggtacaggttatgttgaggatggatatgatcaacgtaataccggcatctatctgaccgggctgcaacaagtcggcgattttacctttgaaggcgcagcacgcagtgacgataacagtcagtttggtcgtcatggaacctggcaaaccagcgccggttgggaattcatcgaaggttatcgcttcattgcttcctacgggacatcttataaggcaccaaatctggggcaactgtatggcttctacggaaatccgaatctggacccggagaaaagcaaacagtgggaaggcgcgtttgaaggcttaaccgctggggtgaactggcgtatttccggatatcgtaacgatgtcagtgacttgatcgattatgatgatcacaccctgaaatattacaacgaagggaaagcgcggattaagggcgtcgaggcgaccgccaattttgataccggaccactgacgcatactgtgagttatgattatgtcgatgcgcgcaatgcgattaccgacacgccgttgttacgccgtgctaaacagcaggtgaaataccagctcgactggcagttgtatgacttcgactggggtattacttatcagtatttaggcactcgctatgataaggattacagttcttatccttatcaaaccgttaaaatgggcggtgtgagcttgtgggatcttgcggttgcgtatccggtcacctctcacctgacagttcgtggtaaaatagccaacctgttcgacaaagattatgagacagtctatggctaccaaactgcaggacgggaatacaccttgtctggcagctacaccttctgaaccacgtcccaccgtgctggtgtttgactccggcgtcggtgggttgagcgtctatgacgagatccggcatctcttaccggatctccattacatttatgctttcgataacgtcgctttcccgtatggcgaaaaaagcgaagcgtttattgttgagcgagtggtggcaattgtcaccgcggtgcaagaacgttatccccttgcgctggctgtggtcgcttgcaacactgccagtaccgttagtcttcctgcattacgcgaaaagttcgacttcccggttgttggtgtcgtgccggcgattaaacctgctgcacgtctgacggcaaatggcattgtcggattactggcaacccgcggaacagttaaacgttcttatactcatgagctgatcgcgcgtttcgctaatgaatgccagatagaaatgctgggcagcgcagagatggttgagttggctgaagcgaagctacatggcgaagatgtttctctggatgcactaaaacgtatcctacgcccgtggttaagaatgaaagagccgccagataccgttgtattgggttgcacccatttccctctactacaagaagaactgttacaagtgctgccagagggaacccggctggtggattctggcgcagcgattgctcgccgaacggcctggttgttagaacatgaagccccggatgcaaaatctgccgatgcgaatattgccttttgtatggcaatgacgccaggagctgaacaattattgcccgttttacagcgttacggcttcgaaacgctcgaaaaactggcagttttaggctgatttggttgaatgttgcgcggtcagaaaattattttaaatttcctcttgtcaggccggaataactccctataatgcgccaccactgacacggaacaacggcaaacacgccgccgggtcagcggggttctcctgagaactccggcagagaaagcaaaaataaatgcttgactctgtagcgggaaggcgtattatgcacaccccgcgccgctgagaaaaagcgaagcggcactgctctttaacaatttatcagacaatctgtgtgggcactcgaagatacggattcttaacgtcgcaagacgaaaaatgaataccaagtctcaagagtgaacacgtaattcattacgaagtttaattctttgagcgtcaaacttttaaattgaagagtttgatcatggctcagattgaacgctggcggcaggcctaacacatgcaagtcgaacggtaacaggaagaagcttgcttctttgctgacgagtggcggacgggtgagtaatgtctgggaaactgcctgatggagggggataactactggaaacggtagctaataccgcataacgtcgcaagaccaaagagggggaccttcgggcctcttgccatcggatgtgcccagatgggattagctagtaggtggggtaacggctcacctaggcgacgatccctagctggtctgagaggatgaccagccacactggaactgagacacggtccagactcctacgggaggcagcagtggggaatattgcacaatgggcgcaagcctgatgcagccatgccgcgtgtatgaagaaggccttcgggttgtaaagtactttcagcggggaggaagggagtaaagttaatacctttgctcattgacgttacccgcagaagaagcaccggctaactccgtgccagcagccgcggtaatacggagggtgcaagcgttaatcggaattactgggcgtaaagcgcacgcaggcggtttgttaagtcagatgtgaaatccccgggctcaacctgggaactgcatctgatactggcaagcttgagtctcgtagaggggggtagaattccaggtgtagcggtgaaatgcgtagagatctggaggaataccggtggcgaaggcggccccctggacgaagactgacgctcaggtgcgaaagcgtggggagcaaacaggattagataccctggtagtccacgccgtaaacgatgtcgacttggaggttgtgcccttgaggcgtggcttccggagctaacgcgttaagtcgaccgcctggggagtacggccgcaaggttaaaactcaaatgaattgacgggggcccgcacaagcggtggagcatgtggtttaattcgatgcaacgcgaagaaccttacctggtcttgacatccacggaagttttcagagatgagaatgtgccttcgggaaccgtgagacaggtgctgcatggctgtcgtcagctcgtgttgtgaaatgttgggttaagtcccgcaacgagcgcaacccttatcctttgttgccagcggtccggccgggaactcaaaggagactgccagtgataaactggaggaaggtggggatgacgtcaagtcatcatggcccttacgaccagggctacacacgtgctacaatggcgcatacaaagagaagcgacctcgcgagagcaagcggacctcataaagtgcgtcgtagtccggattggagtctgcaactcgactccatgaagtcggaatcgctagtaatcgtggatcagaatgccacggtgaatacgttcccgggccttgtacacaccgcccgtcacaccatgggagtgggttgcaaaagaagtaggtagcttaaccttcgggagggcgcttaccactttgtgattcatgactggggtgaagtcgtaacaaggtaaccgtaggggaacctgcggttggatcacctccttaccttaaagaagcgtactttgtagtgctcacacagattgtctgatagaaagtgaaaagcaaggcgtttacgcgttgggagtgaggctgaagagaataaggccgttcgctttctattaatgaaagctcaccctacacgaaaatatcacgcaacgcgtgataagcaattttcgtgtccccttcgtctagaggcccaggacaccgccctttcacggcggtaacaggggttcgaatcccctaggggacgccacttgctggtttgtgagtgaaagtcgccgaccttaatatctcaaaactcatcttcgggtgatgtttgagatatttgctctttaaaaatctggatcaagctgaaaattgaaacactgaacaacgagagttgttcgtgagtctctcaaattttcgcaacacgatgatgaatcgaaagaaacatcttcgggttgtgaggttaagcgactaagcgtacacggtggatgccctggcagtcagaggcgatgaaggacgtgctaatctgcgataagcgtcggtaaggtgatatgaaccgttataaccggcgatttccgaatggggaaacccagtgtgtttcgacacactatcattaactgaatccataggttaatgaggcgaaccgggggaactgaaacatctaagtaccccgaggaaaagaaatcaaccgagattcccccagtagcggcgagcgaacggggagcagcccagagcctgaatcagtgtgtgtgttagtggaagcgtctggaaaggcgcgcgatacagggtgacagccccgtacacaaaaatgcacatgctgtgagctcgatgagtagggcgggacacgtggtatcctgtctgaatatggggggaccatcctccaaggctaaatactcctgactgaccgatagtgaaccagtaccgtgagggaaaggcgaaaagaaccccggcgaggggagtgaaaaagaacctgaaaccgtgtacgtacaagcagtgggagcacgcttaggcgtgtgactgcgtaccttttgtataatgggtcagcgacttatattctgtagcaaggttaaccgaataggggagccgaagggaaaccgagtcttaactgggcgttaagttgcagggtatagacccgaaacccggtgatctagccatgggcaggttgaaggttgggtaacactaactggaggaccgaaccgactaatgttgaaaaattagcggatgacttgtggctgggggtgaaaggccaatcaaaccgggagatagctggttctccccgaaagctatttaggtagcgcctcgtgaattcatctccgggggtagagcactgtttcggcaagggggtcatcccgacttaccaacccgatgcaaactgcgaataccggagaatgttatcacgggagacacacggcgggtgctaacgtccgtcgtgaagagggaaacaacccagaccgccagctaaggtcccaaagtcatggttaagtgggaaacgatgtgggaaggcccagacagccaggatgttggcttagaagcagccatcatttaaagaaagcgtaatagctcactggtcgagtcggcctgcgcggaagatgtaacggggctaaaccatgcaccgaagctgcggcagcgacgcttatgcgttgttgggtaggggagcgttctgtaagcctgcgaaggtgtgctgtgaggcatgctggaggtatcagaagtgcgaatgctgacataagtaacgataaagcgggtgaaaagcccgctcgccggaagaccaagggttcctgtccaacgttaatcggggcagggtgagtcgacccctaaggcgaggccgaaaggcgtagtcgatgggaaacaggttaatattcctgtacttggtgttactgcgaaggggggacggagaaggctatgttggccgggcgacggttgtcccggtttaagcgtgtaggctggttttccaggcaaatccggaaaatcaaggctgaggcgtgatgacgaggcactacggtgctgaagcaacaaatgccctgcttccaggaaaagcctctaagcatcaggtaacatcaaatcgtaccccaaaccgacacaggtggtcaggtagagaataccaaggcgcttgagagaactcgggtgaaggaactaggcaaaatggtgccgtaacttcgggagaaggcacgctgatatgtaggtgaggtccctcgcggatggagctgaaatcagtcgaagataccagctggctgcaactgtttattaaaaacacagcactgtgcaaacacgaaagtggacgtatacggtgtgacgcctgcccggtgccggaaggttaattgatggggttagcgcaagcgaagctcttgatcgaagccccggtaaacggcggccgtaactataacggtcctaaggtagcgaaattccttgtcgggtaagttccgacctgcacgaatggcgtaatgatggccaggctgtctccacccgagactcagtgaaattgaactcgctgtgaagatgcagtgtacccgcggcaagacggaaagaccccgtgaacctttactatagcttgacactgaacattgagccttgatgtgtaggataggtgggaggctttgaagtgtggacgccagtctgcatggagccgaccttgaaataccaccctttaatgtttgatgttctaacgttgacccgtaatccgggttgcggacagtgtctggtgggtagtttgactggggcggtctcctcctaaagagtaacggaggagcacgaaggttggctaatcctggtcggacatcaggaggttagtgcaatggcataagccagcttgactgcgagcgtgacggcgcgagcaggtgcgaaagcaggtcatagtgatccggtggttctgaatggaagggccatcgctcaacggataaaaggtactccggggataacaggctgataccgcccaagagttcatatcgacggcggtgtttggcacctcgatgtcggctcatcacatcctggggctgaagtaggtcccaagggtatggctgttcgccatttaaagtggtacgcgagctgggtttagaacgtcgtgagacagttcggtccctatctgccgtgggcgctggagaactgaggggggctgctcctagtacgagaggaccggagtggacgcatcactggtgttcgggttgtcatgccaatggcactgcccggtagctaaatgcggaagagataagtgctgaaagcatctaagcacgaaacttgccccgagatgagttctccctgaccctttaagggtcctgaaggaacgttgaagacgacgacgttgataggccgggtgtgtaagcgcagcgatgcgttgagctaaccggtactaatgaaccgtgaggcttaaccttacaacgccgaagctgttttggcggatgagagaagattttcagcctgatacagattaaatcagaacgcagaagcggtctgataaaacagaatttgcctggcggcagtagcgcggtggtcccacctgaccccatgccgaactcagaagtgaaacgccgtagcgccgatggtagtgtggggtctccccatgcgagagtagggaactgccaggcatcaaataaaacgaaaggctcagtcgaaagactgggcctttcgttttatctgttgtttgtcggtgaacgctctcctgagtaggacaaatccgccgggagcggatttgaacgttgcgaagcaacggcccggagggtggcgggcaggacgcccgccataaactgccaggcatcaaattaagcagaaggccatcctgacggatggcctttttgcgtttctacaaactcttcctgtcgtcatatctacaagccatccccccacagatacggtaaactagcctcgtttttgcatcaggaaagcagctatgaaccactccttaaaaccctggaacacatttggcattgatcataatgctcagcacattgtatgtgccgaagacgaacaacaattactcaatgcctggcagtatgcaaccgcagaaggacaacccgttcttattctgggtgaaggaagtaatgtactttttctggaggactatcgcggcacggtgatcatcaaccggatcaaaggtatcgaaattcatgatgaacctgatgcgtggtatttacatgtaggagccggagaaaactggcatcgtctggtaaaatacactttgcaggaaggtatgcctggtctggaaaatctggcattaattcctggttgtgtcggcagtagtcctatccagaatattggtgcttatggcgtagaattacagcgagtttgcgcttatgttgattctgttgaactggcgacaggcaagcaagtgcgcttaactgccaaagagtgccgttttggctatcgcgacagtatttttaaacatgaataccaggaccgcttcgctattgtagccgtaggtctgcgtctgccaaaagagtggcaacctgtactaacgtatggtgacttaactcgtctggatcctacaacagtaacgccacagcaagtatttaatgcggtgtgtcatatgcgcaccaccaaactccctgatccaaaagtgaatggcaatgccggtagtttcttcaaaaaccctgttgtatctgccgaaacggctaaagcattactgagtcaatttccaacagcaccaaattacccccaggcggatggtagtgtaaaactggcagcaggttggcttatcgatcagtgccagctaaaagggatgcaaataggtggggctgcggtgcaccgtcaacaggcgttagttctcattaatgaagacaatgcaaaaagcgaagatgttgtacagctggcgcatcatgtaagacagaaagttggtgaaaaatttaatgtctggcttgagcctgaagtccgctttattggtgcaagtggtgaagtgagcgcagtggagacaattagttgaaataaagcgcagtggagacaatttcatgaaggataacaccgtgccactgaaattgattgccctgttagcgaacggtgaatttcactctggcgagcagttgggtgaaacgctgggaatgagccgggcggctattaataaacacattcagacactgcgtgactggggcgttgatgtctttaccgttccgggtaaaggatacagcctgcctgagcctatccagttacttaatgctaaacagatattgggtcagctggatggcggtagtgtagccgtgctgccagtgattgactccacgaatcagtaccttcttgatcgtatcggagagcttaaaagcggcgatgcttgcattgcagaataccagcaggctggccgtggtcgccggggtcggaaatggtttagcccttttggcgcaaacttatatttgagcatgttctggcgtctggaacaaggcccggcggcggcgattggtttaagtctggttatcggtatcgtgatggcggaagtattacgcaagctgggtgcagataaagttcgtgttaaatggcctaatgacctctatctgcaggatcgcaagctggcaggcattctggtggagctgactggcaaaactggcgatgcggcgcaaatagtcattggagccgggatcaacatggcaatgcgccgtgttgaagagagtgtcgttaatcaggggtggatcacgctgcaggaagcggggatcaatctcgatcgtaatacgttggcggccatgctaatacgtgaattacgtgctgcgttggaactcttcgaacaagaaggattggcaccttatctgagccgctgggaaaagctggataattttattaatcgcccagtgaaacttatcattggtgataaagaaatatttggcattagtcgcggaatagacaaacagggggctttattacttgagcaggatggaataataaaaccctggatgggcggtgaaatatccctgcgtagtgcagaaaaataagaaaggggagtattcgctcccctgcaaattatttgcgtagtctgacctcttctaccgcatgattagcacttttcgtcaggattaaactggcgcgctcacgagtaggtagaatattttgctttaagttcagccagttgatctctttccacaatgtcatggcagtcttaatcgcttcttctttagttaatttcgcgtagttatgaaaataggaatccgggtcggtaaaagccccttcgcggaatttcagaaaacggttgatataccatgtctgaagtaagtcttccggtgcatcaacatatatgctaaaatcgacaaaatcagaaacaaatacatgatgtggatcgtgtggataatccatcccgctctgtaagacatttaacccttcaagaattaaaatatcaggctgaacaaccgttttatctccatccgggatcacatcataaataagatgactgtaaacaggtgctgtaacgtttggcacgccggatttgagatcggaaacaaacttcaccaggcgatgcatatcatagctttccgggaagcctttcttcttcatcagaccacgttctttcagaacctgattagggtgaaggaagccatctgtagtgatcagttcaacacgacgatgttccggccaacggcttaatagcgcctgcaatacacgggcggttgtacttttccccaccgcgacactgccagcaatactgataatgtaaggaatgcgttgcccgttggtaccaagaaactgttccagaactgcctgacggcgcagattgctgcttatatagaagttcagcaaacgactcaaaggtaaatagatctcggcaacttcttctaagctgagatcttcattaatacctttgagacgggcgatctcatcttcgcttaacgtcataggtacggaatcacgcagagctgcccactggttgcggtcaaactgtaggtaaggcgtcattaacgtttgctcttttatactcataagcatgtttctggcggtcatagctctatcggcaaagcgatatttgccatggcgcgtcacagttctgttgaatgggttaatgggcaggagggtaacaccagatggggaggaataataagaaaaaatctctgccaggaagctatcgttgaaaagcaatgtgacagatattccatctgataaaaagaattatggtttagcaggagcgcattgttgagcacaatgatgttgaaaaagtgtgctaatctgccctccgttcggctgtttcttcatcgtgtcgcataaaatgtgaccaataaaacaaattatgcaattttttagttgcatgaactcgcatgtctccatagaatgcgcgctacttgatgccgacttagctcagtaggtagagcaactgacttgtaatcagtaggtcaccagttcgattccggtagtcggcaccatcaagtccggtggggttcccgagcggccaaagggagcagactgtaaatctgccgtcacagacttcgaaggttcgaatccttcccccaccaccaatttcggccacgcgatggcgtagcccgagacgataagttcgcttaccggctcgaataaagagagcttctctcgatattcagtgcagaatgaaaatcaggtagccgagttccaggatgcgggcatcgtataatggctattacctcagccttccaagctgatgatgcgggttcgattcccgctgcccgctccaagatgtgctgatatagctcagttggtagagcgcacccttggtaagggtgaggtcggcagttcgaatctgcctatcagcaccacttcttttctcctccctgttttttccttctgtttattgcattcaacaagtcgggcatgttgcctggttgatgtggtgatatcaccgatttatccgtgtcttagagggacaatcgatgtctaaagaaaagtttgaacgtacaaaaccgcacgttaacgtcggtactatcggccacgttgaccatggtaaaacaacgctgaccgctgcaatcactaccgtactggctaaaacctacggcggtgctgctcgcgcattcgaccagatcgataacgcgccggaagaaaaagctcgtggtatcaccatcaacacttctcacgttgaatacgacaccccgacccgtcactacgcacacgtagactgcccggggcacgccgactatgttaaaaacatgatcaccggtgctgcgcagatggacggcgcgatcctggtagttgctgcgactgacggcccgatgccgcagactcgtgagcacatcctgctgggtcgtcaggtaggcgttccgtacatcatcgtgttcctgaacaaatgcgacatggttgatgacgaagagctgctggaactggttgaaatggaagttcgtgaacttctgtctcagtacgacttcccgggcgacgacactccgatcgttcgtggttctgctctgaaagcgctggaaggcgacgcagagtgggaagcgaaaatcctggaactggctggcttcctggattcttacattccggaaccagagcgtgcgattgacaagccgttcctgctgccgatcgaagacgtattctccatctccggtcgtggtaccgttgttaccggtcgtgtagaacgcggtatcatcaaagttggtgaagaagttgaaatcgttggtatcaaagagactcagaagtctacctgtactggcgttgaaatgttccgcaaactgctggacgaaggccgtgctggtgagaacgtaggtgttctgctgcgtggtatcaaacgtgaagaaatcgaacgtggtcaggtactggctaagccgggcaccatcaagccgcacaccaagttcgaatctgaagtgtacattctgtccaaagatgaaggcggccgtcatactccgttcttcaaaggctaccgtccgcagttctacttccgtactactgacgtgactggtaccatcgaactgccggaaggcgtagagatggtaatgccgggcgacaacatcaaaatggttgttaccctgatccacccgatcgcgatggacgacggtctgcgtttcgcaatccgtgaaggcggccgtaccgttggcgcgggcgttgtagcaaaagttctgagctaattgccgataacatttgacgcaatgcgcactaaaagggcatcatttgatgccctttttgcacgctttcgtaccagaacctggctcatcagtgattttctttgtcataatcattgctgagacaggctctgttgagggcgtataatccgaaaagctaatacgcgtttcgatttggtttgcctcgcgatcgcggggtgaaaatgtttgtagaaaacttctgacaggttggtttatgagtgcgaataccgaagctcaaggaagcgggcgcggcctggaagcgatgaagtgggtcgttgtggtggcattgctcctggtggcgattgtcggcaactatctttatcgcgacattatgctgccgctgcgtgcgctggccgtagtaattctgattgctgcagcgggtggtgtcgcgctgttaacgacaaaaggtaaagctaccgttgcttttgcccgtgaagcgcgtaccgaagtccgtaaggtcatttggccgactcgccaggaaacattgcacaccacgctgattgtggctgcggttaccgcagtaatgagtctgatcctgtggggactggatggtattctggttcgcctggtatcctttatcactggcctgaggttctgagatgtctgaagctcctaaaaagcgctggtacgtcgttcaggcgttttccggttttgaaggccgcgtagcaacgagcctgcgtgagcatatcaaattacacaacatggaagatttgtttggtgaagtcatggtaccaaccgaagaagtggttgaaatccgtggcggtcagcgtcgcaaaagcgaacgtaaattcttccctggctacgtcctcgttcagatggtgatgaacgacgcgagctggcacctggtgcgcagcgtaccgcgtgtgatgggcttcatcggcggtacttccgatcgtcctgcgccaatcagcgataaagaagtcgatgcgattatgaaccgcctgcagcaggttggtgataagccgcgtccgaaaacgctgtttgaaccgggtgaaatggtccgtgttaatgatggtccgttcgctgacttcaacggtgttgttgaagaagtggattacgagaaatctcgtctgaaagtgtctgtttctatcttcggtcgtgcgaccccggtagagctggacttcagccaggttgaaaaagcctaacccagcgatcaaaaaagcggcgatttaatcgttgcacaaggcgtgagattggaatacaatttcgcgccttttgtttttatgggccttgcccgtaaaacgattttttatatcacggggagcctctcagaggcgttattacccaacttgaggaatttataatggctaagaaagtacaagcctatgtcaagctgcaggttgcagctggtatggctaacccgagtccgccagtaggtccggctctgggtcagcagggcgtaaacatcatggaattctgcaaagcgttcaacgcaaaaactgattccatcgaaaaaggtctgccgattccggtagtaatcaccgtttacgctgaccgttctttcactttcgttaccaagaccccgccggcagcagttctgctgaaaaaagcggctggtatcaagtctggttccggtaagccgaacaaagacaaagtgggtaaaatttcccgcgctcagctgcaggaaatcgcgcagaccaaagctgccgacatgactggtgccgacattgaagcgatgactcgctccatcgaaggtactgcacgttccatgggcctggtagtggaggactaagaaatggctaaactgaccaagcgcatgcgtgttatccgcgagaaagttgatgcaaccaaacagtacgacatcaacgaagctatcgcactgctgaaagagctggcgactgctaaattcgtagaaagcgtggacgtagctgttaacctcggcatcgacgctcgtaaatctgaccagaacgtacgtggtgcaactgtactgccgcacggtactggccgttccgttcgcgtagccgtatttacccaaggtgcaaacgctgaagctgctaaagctgcaggcgcagaactggtaggtatggaagatctggctgaccagatcaagaaaggcgaaatgaactttgacgttgttattgcttctccggatgcaatgcgcgttgttggccagctgggccaggttctgggtccgcgcggcctgatgccaaacccgaaagtgggtactgtaacaccgaacgttgctgaagcggttaaaaacgctaaagctggccaggttcgttaccgtaacgacaaaaacggcatcatccacaccaccatcggtaaagtggactttgacgctgacaaactgaaagaaaacctggaagctctgctggttgcgctgaaaaaagcaaaaccgactcaggcgaaaggcgtgtacatcaagaaagttagcatctccaccaccatgggtgcaggtgttgcagttgaccaggctggcctgagcgcttctgtaaactaatgcctttacgtgggcggtgattttgtctacaatcttacccccacgtataatgcttaatgcagacgtatatccgagatattcgggttgtggcaaggcggcaactgagtgagtcgccaggagcatagctaactatgtgactggtgcgaatgaaggaagccaacgccgtcacaagctgaatagcgacggatagaaaagatttgttcgttggagcctggcctatccaggcctccgtcgaagaccgcaggagtttcgcaagaaacttaatcccctgcgtagacggtgacagaacgctaagattattcttttatattctggcttgtttctgctcaccgtaattaagacgctctctccgtttggaggagtgaagtgagttccagagattttctctggcaaacatccaggagcaaagctaatggctttaaatcttcaagacaaacaagcgattgttgctgaagtcagcgaagtagccaaaggcgcgctgtctgcagtagttgcggattcccgtggcgtaactgtagataaaatgactgaactgcgtaaagcaggtcgcgaagctggcgtatacatgcgtgttgttcgtaacaccctgctgcgccgtgctgttgaaggtactccgttcgagtgcctgaaagacgcgtttgttggtccgaccctgattgcatactctatggaacacccgggcgctgctgctcgtctgttcaaagagttcgcgaaagcgaatgcaaaatttgaggtcaaagccgctgcctttgaaggtgagctgatcccggcgtctcagatcgaccgcctggcaactctgccgacctacgaagaagcaattgcacgcctgatggcaaccatgaaagaagctagcgctggcaaactggttcgtactctggctgctgtacgcgatgcgaaagaagctgcttaatcgcagttatctttttaacgcattcgcttacgtataaacttattctgatattcaggaacaatttaaatgtctatcactaaagatcaaatcattgaagcagttgcagctatgtctgtaatggacgttgtagaactgatctctgcaatggaagaaaaattcggtgtttccgctgctgctgctgtagctgtagctgctggcccggttgaagctgctgaagaaaaaactgaattcgacgtaattctgaaagctgctggcgctaacaaagttgctgttatcaaagcagtacgtggcgcaactggcctgggtctgaaagaagctaaagacctggtagaatctgcaccggctgctctgaaagaaggcgtgagcaaagacgacgcagaagcactgaaaaaagctctggaagaagctggcgctgaagttgaagttaaataagccaacccttccggttgcagcctgagaaatcaggctgatggctggtgactttttagtcaccagcctttttgcgctgtaaggcgccagtagcgtttcacactgtttgactactgctgtgcctttcaatgcttgtttctatcgacgacttaatatactgcgacaggacgtccgttctgtgtaaatcgcaatgaaatggtttaagcgtgatagcaacaggcattgcggaaagtgttccattttccggtcaacaaaatagtgttgcacaaactgtccgctcaatggacagatgggtcgacttgtcagcgagctgaggaaccctatggtttactcctataccgagaaaaaacgtattcgtaaggattttggtaaacgtccacaagttctggatgtaccttatctcctttctatccagcttgacagctttcagaaatttatcgagcaagatcctgaagggcagtatggtctggaagctgctttccgttccgtattcccgattcagagctacagcggtaattccgagctgcaatacgtcagctaccgccttggcgaaccggtgtttgacgtccaggaatgtcaaatccgtggcgtgacctattccgcaccgctgcgcgttaaactgcgtctggtgatctatgagcgcgaagcgccggaaggcaccgtaaaagacattaaagaacaagaagtctacatgggcgaaattccgctcatgacagacaacggtacctttgttatcaacggtactgagcgtgttatcgtttcccagctgcaccgtagtccgggcgtcttctttgactccgacaaaggtaaaacccactctagcggtaaagtgctgtataacgcgcgtatcatcccttaccgtggttcctggctggacttcgaattcgatccgaaggacaacctgttcgtacgtatcgaccgtcgccgtaaactgcctgcgaccatcattctgcgcgccctgaactacaccacagagcagatcctcgacctgttctttgaaaaagttatctttgaaatccgtgataacaagctgcagatggaactggtgccggaacgcctgcgtggtgaaaccgcatcttttgacatcgaagctaacggtaaagtgtacgtagaaaaaggccgccgtatcactgcgcgccacattcgccagctggaaaaagacgacgtcaaactgatcgaagtcccggttgagtacatcgcaggtaaagtggttgctaaagactatattgatgagtctaccggcgagctgatctgcgcagcgaacatggagctgagcctggatctgctggctaagctgagccagtctggtcacaagcgtatcgaaacgctgttcaccaacgatctggatcacggcccatatatctctgaaaccttacgtgtcgacccaactaacgaccgtctgagcgcactggtagaaatctaccgcatgatgcgccctggcgagccgccgactcgtgaagcagctgaaagcctgttcgagaacctgttcttctccgaagaccgttatgacttgtctgcggttggtcgtatgaagttcaaccgttctctgctgcgcgaagaaatcgaaggttccggtatcctgagcaaagacgacatcattgatgttatgaaaaagctcatcgatatccgtaacggtaaaggcgaagtcgatgatatcgaccacctcggcaaccgtcgtatccgttccgttggcgaaatggcggaaaaccagttccgcgttggcctggtacgtgtagagcgtgcggtgaaagagcgtctgtctctgggcgatctggataccctgatgccacaggatatgatcaacgccaagccgatttccgcagcagtgaaagagttcttcggttccagccagctgtctcagtttatggaccagaacaacccgctgtctgagattacgcacaaacgtcgtatctccgcactcggcccaggcggtctgacccgtgaacgtgcaggcttcgaagttcgagacgtacacccgactcactacggtcgcgtatgtccaatcgaaacccctgaaggtccgaacatcggtctgatcaactctctgtccgtgtacgcacagactaacgaatacggcttccttgagactccgtatcgtaaagtgaccgacggtgttgtaactgacgaaattcactacctgtctgctatcgaagaaggcaactacgttatcgcccaggcgaactccaacttggatgaagaaggccacttcgtagaagacctggtaacttgccgtagcaaaggcgaatccagcttgttcagccgcgaccaggttgactacatggacgtatccacccagcaggtggtatccgtcggtgcgtccctgatcccgttcctggaacacgatgacgccaaccgtgcattgatgggtgcgaacatgcaacgtcaggccgttccgactctgcgcgctgataagccgctggttggtactggtatggaacgtgctgttgccgttgactccggtgtaactgcggtagctaaacgtggtggtgtcgttcagtacgtggatgcttcccgtatcgttatcaaagttaacgaagacgagatgtatccgggtgaagcaggtatcgacatctacaacctgaccaaatacacccgttctaaccagaacacctgtatcaaccagatgccgtgtgtgtctctgggtgaaccggttgaacgtggcgacgtgctggcagacggtccgtccaccgacctcggtgaactggcgcttggtcagaacatgcgcgtagcgttcatgccgtggaatggttacaacttcgaagactccatcctcgtatccgagcgtgttgttcaggaagaccgtttcaccaccatccacattcaggaactggcgtgtgtgtcccgtgacaccaagctgggtccggaagagatcaccgctgacatcccgaacgtgggtgaagctgcgctctccaaactggatgaatccggtatcgtttacattggtgcggaagtgaccggtggcgacattctggttggtaaggtaacgccgaaaggtgaaactcagctgaccccagaagaaaaactgctgcgtgcgatcttcggtgagaaagcctctgacgttaaagactcttctctgcgcgtaccaaacggtgtatccggtacggttatcgacgttcaggtctttactcgcgatggcgtagaaaaagacaaacgtgcgctggaaatcgaagaaatgcagctcaaacaggcgaagaaagacctgtctgaagaactgcagatcctcgaagcgggtctgttcagccgtatccgtgctgtgctggtagccggtggcgttgaagctgagaagctcgacaaactgccgcgcgatcgctggctggagctgggcctgacagacgaagagaaacaaaatcagctggaacagctggctgagcagtatgacgaactgaaacacgagttcgagaagaaactcgaagcgaaacgccgcaaaatcacccagggcgacgatctggcaccgggcgtgctgaagattgttaaggtatatctggcggttaaacgccgtatccagcctggtgacaagatggcaggtcgtcacggtaacaagggtgtaatttctaagatcaacccgatcgaagatatgccttacgatgaaaacggtacgccggtagacatcgtactgaacccgctgggcgtaccgtctcgtatgaacatcggtcagatcctcgaaacccacctgggtatggctgcgaaaggtatcggcgacaagatcaacgccatgctgaaacagcagcaagaagtcgcgaaactgcgcgaattcatccagcgtgcgtacgatctgggcgctgacgttcgtcagaaagttgacctgagtaccttcagcgatgaagaagttatgcgtctggctgaaaacctgcgcaaaggtatgccaatcgcaacgccggtgttcgacggtgcgaaagaagcagaaattaaagagctgctgaaacttggcgacctgccgacttccggtcagatccgcctgtacgatggtcgcactggtgaacagttcgagcgtccggtaaccgttggttacatgtacatgctgaaactgaaccacctggtcgacgacaagatgcacgcgcgttccaccggttcttacagcctggttactcagcagccgctgggtggtaaggcacagttcggtggtcagcgtttcggggagatggaagtgtgggcgctggaagcatacggcgcagcatacaccctgcaggaaatgctcaccgttaagtctgatgacgtgaacggtcgtaccaagatgtataaaaacatcgtggacggcaaccatcagatggagccgggcatgccagaatccttcaacgtattgttgaaagagattcgtagcctgggtatcaacatcgaactggaagacgagtaattctcgctcaaacaggtcactgctgtcgggttaaaacccggcagcggattgtgctaactccgacgggagcaaatccgtgaaagatttattaaagtttctgaaagcgcagactaaaaccgaagagtttgatgcgatcaaaattgctctggctagcccagacatgatccgtagttggtctttcggtgaagttaaaaagccggaaaccatcaactaccgtacgttcaaaccagaacgtgacggccttttctgcgcccgtatctttgggccggtaaaagattacgagtgcctgtgcggtaagtacaagcgcctgaaacaccgtggcgtcatctgtgagaagtgcggcgttgaagtgacccagactaaagtacgccgtgagcgtatgggccacatcgaactggcttccccgactgcgcacatctggttcctgaaaagcctgccgtcccgtatcggtctgctgctcgatatgccgctgcgcgatatcgaacgcgtactgtactttgaatcctatgtggttatcgaaggcggtatgaccaacctggaacgtcagcagatcctgactgaagagcagtatctggacgcgctggaagagttcggtgacgaattcgacgcgaagatgggggcggaagcaatccaggctctgctgaagagcatggatctggagcaagagtgcgaacagctgcgtgaagagctgaacgaaaccaactccgaaaccaagcgtaaaaagctgaccaagcgtatcaaactgctggaagcgttcgttcagtctggtaacaaaccagagtggatgatcctgaccgttctgccggtactgccgccagatctgcgtccgctggttccgctggatggtggtcgtttcgcgacttctgacctgaacgatctgtatcgtcgcgtcattaaccgtaacaaccgtctgaaacgtctgctggatctggctgcgccggacatcatcgtacgtaacgaaaaacgtatgctgcaggaagcggtagacgccctgctggataacggtcgtcgcggtcgtgcgatcaccggttctaacaagcgtcctctgaaatctttggccgacatgatcaaaggtaaacagggtcgtttccgtcagaacctgctcggtaagcgtgttgactactccggtcgttctgtaatcaccgtaggtccatacctgcgtctgcatcagtgcggtctgccgaagaaaatggcactggagctgttcaaaccgttcatctacggcaagctggaactgcgtggtcttgctaccaccattaaagctgcgaagaaaatggttgagcgcgaagaagctgtcgtttgggatatcctggacgaagttatccgcgaacacccggtactgctgaaccgtgcaccgactctgcaccgtctgggtatccaggcatttgaaccggtactgatcgaaggtaaagctatccagctgcacccgctggtttgtgcggcatataacgccgacttcgatggtgaccagatggctgttcacgtaccgctgacgctggaagcccagctggaagcgcgtgcgctgatgatgtctaccaacaacatcctgtccccggcgaacggcgaaccaatcatcgttccgtctcaggacgttgtactgggtctgtactacatgacccgtgactgtgttaacgccaaaggcgaaggcatggtgctgactggcccgaaagaagcagaacgtctgtatcgctctggtctggcttctctgcatgcgcgcgttaaagtgcgtatcaccgagtatgaaaaagatgctaacggtgaattagtagcgaaaaccagcctgaaagacacgactgttggccgtgccattctgtggatgattgtaccgaaaggtctgccttactccatcgtcaaccaggcgctgggtaaaaaagcaatctccaaaatgctgaacacctgctaccgcattctcggtctgaaaccgaccgttatttttgcggaccagatcatgtacaccggcttcgcctatgcagcgcgttctggtgcatctgttggtatcgatgacatggtcatcccggagaagaaacacgaaatcatctccgaggcagaagcagaagttgctgaaattcaggagcagttccagtctggtctggtaactgcgggcgaacgctacaacaaagttatcgatatctgggctgcggcgaacgatcgtgtatccaaagcgatgatggataacctgcaaactgaaaccgtgattaaccgtgacggtcaggaagagaagcaggtttccttcaacagcatctacatgatggccgactccggtgcgcgtggttctgcggcacagattcgtcagcttgctggtatgcgtggtctgatggcgaagccggatggctccatcatcgaaacgccaatcaccgcgaacttccgtgaaggtctgaacgtactccagtacttcatctccacccacggtgctcgtaaaggtctggcggataccgcactgaaaactgcgaactccggttacctgactcgtcgtctggttgacgtggcgcaggacctggtggttaccgaagacgattgtggtacccatgaaggtatcatgatgactccggttatcgagggtggtgacgttaaagagccgctgcgcgatcgcgtactgggtcgtgtaactgctgaagacgttctgaagccgggtactgctgatatcctcgttccgcgcaacacgctgctgcacgaacagtggtgtgacctgctggaagagaactctgtcgacgcggttaaagtacgttctgttgtatcttgtgacaccgactttggtgtatgtgcgcactgctacggtcgtgacctggcgcgtggccacatcatcaacaagggtgaagcaatcggtgttatcgcggcacagtccatcggtgaaccgggtacacagctgaccatgcgtacgttccacatcggtggtgcggcatctcgtgcggctgctgaatccagcatccaagtgaaaaacaaaggtagcatcaagctcagcaacgtgaagagcgttgtgaactccagcggtaaactggttatcacttcccgtaatactgaactgaaactgatcgacgaattcggtcgtactaaagaaagctacaaagtaccttacggtgcggtactggcgaaaggcgatggcgaacaggttgctggcggcgaaaccgttgcaaactgggacccgcacaccatgccggttatcaccgaagtaagcggttttgtacgctttactgacatgatcgacggccagaccattacgcgtcagaccgacgaactgaccggtctgtctagcctggtggttctggattccgcagaacgtaccgcaggtggtaaagatctgcgtccggcactgaaaatcgttgatgctcagggtaacgacgttctgatcccaggtaccgatatgccagcgcagtacttcctgccgggtaaagcgattgttcagctggaagatggcgtacagatcagctctggtgacaccctggcgcgtattccgcaggaatccggcggtaccaaggacatcaccggtggtctgccgcgcgttgcggacctgttcgaagcacgtcgtccgaaagagccggcaatcctggctgaaatcagcggtatcgtttccttcggtaaagaaaccaaaggtaaacgtcgtctggttatcaccccggtagacggtagcgatccgtacgaagagatgattccgaaatggcgtcagctcaacgtgttcgaaggtgaacgtgtagaacgtggtgacgtaatttccgacggtccggaagcgccgcacgacattctgcgtctgcgtggtgttcatgctgttactcgttacatcgttaacgaagtacaggacgtataccgtctgcagggcgttaagattaacgataaacacatcgaagttatcgttcgtcagatgctgcgtaaagctaccatcgttaacgcgggtagctccgacttcctggaaggcgaacaggttgaatactctcgcgtcaagatcgcaaaccgcgaactggaagcgaacggcaaagtgggtgcaacttactcccgcgatctgctgggtatcaccaaagcgtctctggcaaccgagtccttcatctccgcggcaagcttccaggagaccactcgcgtgctgaccgaagcagccgttgcgggcaaacgcgacgaactgcgcggcctgaaagagaacgttatcgtgggtcgtctgatcccggcaggtaccggttacgcgtaccaccaggatcgtatgcgtcgccgtgctgcgggtgaagctccggctgcaccgcaggtgactgcagaagacgcatctgccagcctggcagaactgctgaacgcaggtctgggcggttctgataacgagtaatcgttaatccgcaaataacgtaaaaacccgcttcggcgggtttttttatggggggagtttagggaaagagcatttgtcagaatatttaaggaatttctgaatactcataatcaatgtagagatgactaatatcctgaaactgactgaactaattgagtcaaactcggcaaggattcgatactattcctgtgtaactttcttaaggaacgagaatgaaacaggaagtggaaaagtggcgaccttttggacatccggatggtgatattcgtgatttaagttttcttgatgctcatcaggctgtctacgttcagcatcatgagggcaaagagcctttagagtatcgcttttgggttacctactctcttcactgcttcacaaaagattatgaacatcagacgaacgaagaaaaacaaagcttaatgtaccacgcgcctaaagaatctcgtcccttctgccagcaccgttataacttagcgcgcacacacttaaaaagaactattttggcgctgccagaaagcaacgttattcatgccgggtatggtagctatgccgtgattgaggtggacttagacggaggagataaggcattttactttgttgcgttcagggctttcagggaaaagaaaaaactccgtttgcatgtaactagcgcttatcccatttctgaaaaacagaaaggtaaaagtgtgaaatttttcaccattgcctacaacttattgagaaataagcagcttcctcagcccagtaaataacaaaacccaccttaaggtgggtttcgccagagaattatctctggtattcagaacgccattaccggactttgccttgaccttgcgataatcgcaggttgcgggatgtctgaatttcttcagtctgctgcatcctggaagatgagaacatgtgttcttattttcgtctctatcatagttgagtatttactctcttacaatcagatctctttcattgctcaacaggcgatggcttcagactttgcattacggaatttttaagaaaggcagggcgaaacgaggaagaagcttttcgccctggacaacattcctgctgacggcactaccataaaaaaacacaacgctttcaacaaccttgcgtttttcatcttccgtagcggctcggaataaatttacgttcttacattccgtctcatagtctttggctggcgcgtcccagatagctgtcccagtctttccataccggctgcaaaccctgagcggttaacgcggcagcaaccgcttccggtctgcgatcgtcgtgcggactgaactgttccaactcggggtgattatcggcatagccacctggctgcgttttgctgaaggcgctgacgttattgatcgccagcggaataacgcgatcgcgaaaccacggactttcccgcgtggagagactcagttcaatctccggtgcaagcagtcggaaggcgcagatggtttgcactaactggcgttcatccataatgctcgcaggctcaatgccgccagtacacgggcgcaggcgcggaaaggagacagagtaacggctttgccagtaatgctgttgcagccatagcaaatgttcggcaaccatatagctgtcaacgcgccagttgtcggaaaggccaattagcgcgccgaggcctatcttatcaatccccgcacgccccagccgatccggcgtttccagccgccagaagaagtcctgttttttgcctttcagatgatggcgggcataagtcgcctcgtgatatgtctcctgataaaccatcacgccatccagaccaagttgctttaactcggcgtattccgtctccgccagcggttgcacttccatctgtagactagagaactgttcacgaagggcagggagatgacgacgaaagtaatccatccccactttcgcctgatgttcaccagtgactaacagcagatgttcaaagcccatctcccgtatagcggcactttccctggcaatatccgcttcatccagcgttttgcgcttgatgcgattactcatggaaaatccacagtacgtgcagtcgttagcgcaaagattggaaagataaagcgggacgtagaaactaactgtgttgccaaatcgctgacgggtcagacgctgcgcccgttgggccagttgttccagatagccactggcggcagggcttaacagcgccatcatgtcgtcgcgggtgagttggctggcatttagcgcccgctctacgtcagcagccgttttgccgttgatacgcaggcggatgtcgtcccagtccagttgtcgccagcgatcgctgaaggttttcatgcgcttgcctccagaaatccggtcagcgggctggtggcatgagcaaaataactgcggctgcccggtccggactgacgtgccagtaggcctgcttctaccgccagacgaaatgccttcgccatgttgacgggatcgtccgcgacggcaatcgccgtattcactaacaccgcgtcggcccccatttccagcgcctgcgcggcatggctgggaacgccgatgccagcatcgacaaccaccggcactgtggcctgctggataataatctccagcatggcgcgggtttccagtccctgattgctgccaatcggcgcgccgagcggcatcaccgctgcacagccgacttcttccagacgtttacacaataccggatcggccccgcagtaaggcagcacgacaaatccctgttgtaccagcgtttcggcggctttcagggtttcgatgggatcgggcaacagccagcgggcgtcagggtgaatctctaattttaaccagtttgtgcctaacgcttcacgagccagatgggcggcgaaaatggcttcttccgctgttttcgccccggatgtatttggcagcagggtcacacccgccgcgataagcggttcgaggatagcgtcgttgtgctggcgcaagtcgacacgtttcatcgccagtgtcaccagctggctgccggaagcgcggatcgcctccaccatcagttgactagaagcgaatttccctgtgccggtaaacagatgactatcaaacgttttgtccgcaatacgtaacatttcaaccccctgcaataacctgaaaaagcaggatctggtcgccatcctgcacgatatgttgcgcccactgctcacgcgggacgatttgctgattaatcgccagagccgcgcccgcttgtcgttggtcgagttgctccagtagttcgtgaacagtttgcccggcggcgcactgcatcgcttgatcgttaaacaggatctgcattgcttcctccgcataccgggcaaccactggcgcggcgcaacgccaggctgcgccactggctgcttttaccgtcgaacagtcggagttctcccgcaggtgtctctataccgcttaataacttaatggcttccagtgcctgcaaagtgcccataaccccgaccaccgggccaaccacgcccgccgtgcggcagttgcgttctggctcctggttatctggccacaggcagcggtaacacccctgctcccagggcggcgtcagtaccatcaactgaccgccaaatccgaccgcgctggcggtgataagcggcgtgttgagtgccacgcaggcggcattaatctcctggcgagtcgccatattgtcggtacagtcgagcaccacatcggcccgtgcaaccgcatcttttaacgcctcacccgttaaccgttgttgtaatgctgtcagttgaatgtcgggattcaactgtgtcagtcgctgttggctgacctggcttttcgggcgatcgatatcttcagtggtaaagaggatttgtcgttgcagattgcttaaatgcacatcgtcgtcatctgccagtaccagcgtcccgacgccagcgcccgccaggtacagcgcagcaggtgtacccagcccgcccagaccgataatcagcacctggctgtcgagcagtttttgctgcccgtccagagcgatatcgtcgagcaggatttggcggctataacgcataaagtcacggtcattcatcgccaactcctgcaatttccagcaactgtgccgttgccaaacgccagtctgcggcttgagtaatggcgctgacgacggcgatactgccgacacccgttgctatcaccgcaggcgcgcgtgccagactgataccgccaatcgccacggtgggataatccgccagtcgctcaacatgccgtgccagctgttccagcccctgcggtgcagaaggcatctgtttggtttgcgtcgggaacacatgtcccagcgcgatataagaggggcgtgctgccagcgcgacgtcgatttccatatcgtcatgtgtgctaacgcccagccgcaggcctgccgcgcggatggcattgagatcggtggcttgcaaatcttcctgccccaaatggacgccatacgcctgatgcttgatcgccagccgccagtaatcgttgataaacaatcgcgcgttatagcggcggcccagcgcaattgccgccacgacatcggcttccacctcttcatcgcgccgatctttgatgcgtagctggagagtacgtacgcctgcatccaacagacgttcgatccactgtacgctgtccaccaccgggtacagtccactacgaaaaggtacaggaggaaaatcaggctgatacatcacgcttcctccttacgcaggtagatttctccgcctctggcacggaagttctcgctcatatccgccattcccatttcaatagtttgcgtggcggcgtaatcacgcacttcctggctgattttcatgctgcagaatttcggcccacacatggagcaaaaatgggcgactttaccactctcttgcggcagggtttcatcgtgataagcgcgggcggtaaacgggtcgagggccagattaaactggtcttcccagcgaaattcgaagcgggctttgctcatggcgttatcgcgaatttgcgcgcccggatgccctttcgccaggtcagcggcgtgggcagcaatcttataggtgataagcccctgcttaacatcttctttattgggcagacccagatgctcttttggcgttacgtaacagagcatcgcgcagccaaaccagccaatcatcgccgcaccaatcccgctcgtgaagtggtcatagcccggcgcaatatcggtagttagcggccccagagtgtaaaacggcgcttcgtggcagtgctctaactcctcggtcatattgcggcggatcatctgcatcggcacgtggcctgggccttcaatcatcacctgcacgtcatattcccaggcaattttggtcagttcgcccagcgtatgcagctcggcaaactgcgcttcatcgttggcgtcctgaatagaaccggggcgcagaccgtcgcccaggctcaggctaacgtcataagcggcacagatttcacaaatttcgcggaagtgttgatagaggaaattttcctgatgatgggagaggcaccatttcgccataatgctaccgccgcgagagacgataccggtcaggcgtttcgcggtcatcggcacatagcgcagcagtacgcccgcatggatagtgaagtaatccacaccttgctcggcctgttccagcagcgtgtcgcggaacgcttcccaggtaagatcttcggcgatcccgttaaccttctccagcgcctggtagatcggcactgtaccgatcggcaccgggctgttacgcaaaatccactcgcgggtttcgtgaatatagcgaccggtggagagatccatcaccgtatccgctccccagcgcgtggaccataccagcttttccacttcttcttcgatggaagaggtgaccgcgctgttgccgatattggcgttaacttttaccaggaaattgcgaccaataatcatcggctcgctttccggatgattaatgttggccgggataatcgcacgtccggcagcaacttcatcacggacaaattccgcagtgatattttccggcagatgtgcgccaaagctcattcccggatgctggtggcgtaaaacctcgctacggatgcgctcgcggcccatattctcgcggatggcgatgaattccatttccggcgtgatgatgccctggcgggcgtagtgcagttgggtgacacggcgtcctgctttggcgcgttttggtgttagtacgccgctaaaacgcagttcgtcgaggccatcatctgccagccgcgctttagtgtaatcggaactgcgcacggtaagttcttcggtatcgccgcgcgcatcgatccacggctggcgtagttttgccagcccttgctgcacgttaatggcaatctgcggatcaccatacgggccggaggtgtcgtagaccggaatcgcttcgttttcttcgtactgcggctgttctttgctaccgccaattagcgtcgggctaagctggatctcacgcatcggcacgcgcacgccggggtgtgtgccagtgatataaatgcgtttactgttgggaaaggcggtgccttccagggtgtcgataaaatgttgggcccgggcgcgttgttcgcggcgggtcagttttgttgcagacatagctcattccaaaaagttaaggacgtggcttgtcagacgacggatgaagcaagagacgatcgccgcaggggcgatgcgatagcagattaactcttgttcccttcgcaggtattagcctgatcaggttccgcggatcccgaataaacggtctcagccagttaaggcactccgacaagaaattagccccgcaaatggggcattgaatgtaaattacgcgttaacagcgcagaactcaagcaggatgtttgacgcgggcggcgtcaagcaccagcagaatcagcttatcttccagcacaaagcgcgcttccagcgcctcgccgatgtcagataaaacctgttgaaactcaaggtaattatcatgatcgatggcggtttccagactggaatcgtagtaatccataatctgttgagtattggcttcgagttgcggccaaatcttcgcggcgcgcgcgagttgcccgttgccttccagcttatgaagaatgcgctcataaatactgaaatgtccggcagacaagtaatcgaccaggctctgacaaaaatcatcaagggctttttcgtttagcctcatgtagctttctttgccaggcttaatgccaaccagattgtagtaagccacgagcagatgcttacgtacatgtagccagcgatcaaccagtttgttacttcctctgacgcgctccgtcaggttatcgagctggttaagcatgattgactccgcaagtttgtattcaaaaactgctcagtgagaaatgtaaaaaccatgttaaacatgccagtgatgcaaaggtagtgcaagagctatggatcgtataattgaaaaattagatcacggctggtgggtcgtcagccatgaacaaaaattatggttgccgaagggagaattgccatatggcgaagcggcaaatttcgatcttgtgggtcagcgcgcactacaaatcggcgaatggcagggggaacctgtttggttagtacaacagcagcggcgtcacgatatggggagcgtacgtcaggtcattgatctcgatgttgggctgtttcaactggccggacgaggcgtacaactggcggagttttaccgaagccataaatactgtggttactgcgggcatgaaatgtatccgagcaaaaccgaatgggcgatgctgtgcagccattgccgtgagcgttactacccgcaaatcgccccctgcattattgttgccatccgtcgcgatgatagcatcctcctcgcccagcatacccgccatcgtaacggtgtccatacagtacttgccggattcgtcgaagtgggcgaaaccctcgagcaggcagtcgcgcgggaagtgatggaagagagcggaattaaagttaaaaacttgcgttacgtgacttctcagccgtggccgtttcctcagtctttaatgaccgcgtttatggcggaatatgacagcggcgacatcgtgatcgacccgaaagaattgctcgaggcgaactggtatcgctatgacgatttgccgttactcccgccgcccggcaccgtagcgcgccgtctgatagaagatacggtggcgatgtgtcgggcagagtatgagtgatgatacactgaccgcctgacgcactaaggaacagccaaaatgaccgaacttaaaaacgatcgttatctgcgggcgctgctgcgccagcccgttgatgtcactccagtatggatgatgcgccaggcgggtcgctatctaccggaatataaagccacgcgcgcccaggcaggcgattttatgagcctgtgcaaaaacgccgagctggcgtgcgaagtgactttgcaaccgctgcgtcgctacccgctggatgcggcgatcctcttttccgatatcctcaccgtgccggacgcgatggggttagggctctattttgaagccggagaaggtccgcgttttaccagcccagtcacctgcaaagctgacgtcgataaactgccaattccggacccggaagatgaactgggttacgtgatgaacgcggtgcgtaccattcgtcgcgaactgaaaggcgaagtgccgctgattggtttttccggcagcccgtggacgctggcgacctacatggtggaaggcggcagcagcaaagccttcaccgtgatcaaaaaaatgatgtatgccgatccgcaggcgctgcacgctctgctcgataaactggcgaaaagcgtcactttgtatctgaatgcgcagattaaagccggtgctcaggcagtgatgattttcgacacctggggcggcgtgcttaccgggcgcgattatcaacagttcagcctctattacatgcataaaattgttgatggtttactgcgtgaaaacgacggtcgccgcgtaccggtcacgctgtttaccaaaggcggcggacagtggctggaagccatggcagaaaccggttgcgatgcgctgggcctcgactggacaacggacatcgccgatgcgcgccgccgtgtgggcaataaagtcgcgttgcagggtaatatggatccgagcatgctgtacgcgccgcctgcccgcattgaagaagaagtagcgactatacttgcaggtttcggtcacggcgaaggtcatgtctttaaccttggtcacggcattcatcaggatgtgccgccagaacatgctggcgtgttcgtggaggcagtgcatcgactgtctgaacagtatcaccgctaaggagtgattatggatctcgcgagtttacgcgctcaacaaatcgaactggcttcttctgtgatccgcgaggatcgactcgataaagatccaccggatctgatcgccggagccgatgtcgggtttgagcagggcggagaagtgacgcgagcggcgatggtgctgctgaaatatcccagccttgagctggtcgagtataaagttgcccgcatcgccaccaccatgccttacattccaggttttctttccttccgcgaatatcctgcgctgctggcagcgtgggagatgctgagccaaaagccggatttagtgtttgtcgatggtcatgggatcagccatcctcgccgtcttggcgtcgccagccattttggcttattggtggatgtgccgaccattggcgtggcgaaaaaacggctctgcggtaaattcgaaccgctctccagcgaaccgggcgcgctggccccactgatggataaaggcgagcagctggcctgggtctggcgcagcaaagcgcgctgtaacccgttgtttatcgctaccggccatcgggtcagcgtggacagcgcgctggcgtgggtacaacgctgcatgaaaggctatcgtctgccggagccaacgcgctgggcggacgcggtggccagcgaacgtccggcgttcgtgcgctatacagcaaatcagccctaattcaggtaaactgcggataatttccgtatttgagaactcaacatgttacaaaacccaattcatctgcgtctggagcgcctggaaagctggcagcatgtcactttcatggcttgcttatgcgaacgcatgtaccccaattacgccatgttctgccagcaaaccggttttggtgatgggcaaatttaccgtcgcattctcgatctcatctgggaaacgctgaccgttaaagacgcaaaagtaaatttcgacagccaactggagaaatttgaagaagcgattcctagtgccgacgatttcgatctgtacggcgtttatccggcaatcgatgcctgcgtggcgttaagtgaactggtccatagccgtttgagtggtgaaacgctcgaacacgcggtggaagtgagtaagacctccatcacgaccgttgcgatgctggaaatgactcaggctggtcgcgaaatgagcgatgaagagcttaaagaaaacccagctgtagagcaagaatgggacattcagtgggaaatattccgacttttagctgagtgcgaagaacgcgatatcgagctgataaaaggccttagggcagacctgcgtgaggcgggtgagagcaatattggtataatttttcagcaataagaccagaaaacgtgatttaacgcctgatttgtcgtacctggagtcttccctttcgccccccgtctggtctacatttggggggcgaaaaaaagtggctatcggtgcgtgtatgcaggagagtgctattctggcatttccgtcgcactcgatgcttagcaagcgataaacacattgtaaggataacttatgaacaagactcaactgattgatgtaattgcagagaaagcagaactgtccaaaacccaggctaaagctgctctggagtccactctggctgcaattactgagtctctgaaagaaggcgatgctgtacaactggttggtttcggtaccttcaaagtgaaccaccgcgctgagcgtactggccgcaacccgcagaccggtaaagaaatcaaaattgccgcagctaacgtaccggcatttgtttctggcaaggcactgaaagacgcagttaagtaagattgcgtggcagtgaacagttttaacgaaggggtggttagtccccttttgtctttctggcgtcgaagtttgatgctggctggcgctctgcttctcactgcctgtagtcataactctagtcttcctccctttaccgccagtggatttgctgaagaccagggcgcggtacgcatctggcgaaaagacagcggcgataatgtgcatctgcttgccgtgtttagcccgtggcgcagtggcgataccacgacgcgagagtatcgctggcagggcgataacctcacgctcatcaatatcaatgtttacagcaaaccgccggtgaatattcgcgcgcgttttgacgatcgcggtgatctgagctttatgcaacgtgaatccgatggggaaaagcagcagctttctaacgaccaaatcgatttataccgttatcgtgctgatcagatccgccagattagcgatgccttacgtcaggggagagtcgtgctgcgccaggggcgctggcatgcgatggaacagaccgtgaccacctgcgaagggcaaaccattaaacctgatttagatagccaggcgatagcgcatatcgagcgccgccagagccgctcttctgttgatgtcagcgtggcatggctggaagcgcccgaaggtagccaattactgttagtggcaaactctgatttctgtcgctggcaacccaacgagaaaacgttctgatttaccagtggcccatacccatatgaccgccaccaccgcagccgccgtagcccatgcccattccggctccgcgcggaatacccgcttcagccatcgcgatatctcgtttcacccgtaactcatctaagctctgacgcaaattctccatctctttggcgaccgcgttaattttgctgctatccggtgggttcgcggctaacagggcattgtattcataacgcttcgtcaccagttgctgttgcagtgcgctgctttgagcgtaaaagtcattatggattttctgccacgctgtctgttgttcgctggtcaaaggcgcggcattttgctgccacataccgtgtccgccgtgagcaaatgcagatgtgcttcccatcgccattgcactaagcgccatcattaccagggcaattttcgtgttccgtttcatggttaatcctccagtggttgtcttacttcgggtattgcatcttccgtgccaacgatgaaacgctgatatgacgggtaatctggcatgataaacgagtaaaaatgactcgcctgctgcgggtagcgagtcatttttactcattgaaacttaagcctttgtgttacagcgcagggtaagcgctgataaaagatggcatgatttctgctgtcagaaagggatgagcaggcaaagaagaagatgcgttttatgcaacgttctaaagactccttagctaaatggttaagcgcgatcctccccgtggtcattgttgggctggtgggattgtttgcggtaactgtgattcgtgattatgggcgggcaagcgaggcagaccgccaggcattactggaaaaaggtaatgtgcttatccgcgctctggagagcggaagccgcgtagggatggggatgcgaatgcaccatgtacagcaacaggcgcttctggaagagatggcgggacagccgggagtgttgtggttcgcagtcaccgatgcgcagggcatcattattcttcatagcgaccccgataaggtcgggcgtgcgctctatagcccggatgaaatgcagaaattaaagccagaggaaaactcccgctggcggctgcttgggaaaacggaaactacgcctgcacttgaggtctatcgtttgttccagccaatgagtgcgccctggcggcatggaatgcacaatatgccgcgctgtaacggcaaagctgtgccacaagtagatgcacaacaggctatttttatcgccgttgatgccagtgatctggttgcaacccagagtggggaaaagcgcaataccctgattatcctcttcgccctggcgacggtcttgctggcaagcgtattgagtttcttctggtatcgccgctatctgcgcagccgccagcttctacaagatgaaatgaagcgcaaagagaagctggtggcgctggggcatcttgcggcaggcgttgcccacgaaatccgtaacccactttccagcattaaaggactggcgaaatactttgccgagcgcgcgcctgcagggggagaagcgcatcaactggcgcaggtgatggcgaaagaggccgaccgtttaaaccgcgtggtaagcgagttgctggaactggttaagccaacgcatctggctttgcaggcggtggatctcaacacgctgattaaccacagtttacagctggtaagtcaggatgcaaacagccgggagatccagttacgctttaccgccaacgacacattaccggaaattcaggccgacccggacaggctgactcaggtcctgttgaatctctatctcaatgctattcaggcgattggtcagcatggcgtgattagcgtgacggccagcgaaagcggcgcgggcgtgaaaatcagcgttaccgacagcggtaagggaattgcggcagatcagcttgatgccatcttcactccgtacttcaccactaaagccgaaggcaccggattggggctggcggtcgtgcataatattgttgaacaacacggtggtacaattcaggtcgcaagccaggagggaaaaggcagtacgttcaccctctggcttccggtcaatattacgcgtaaggacccacaaggatgacgcacgataatatcgatattctggtggtggatgatgacattagccactgcactattttgcaggctttactgcgcggctggggctataacgtcgcgctggcgaacagcgggcgacaggcgttggagcaggtgcgggaacaggtttttgatcttgtgctttgcgatgtgcgaatggcggagatggacggcatcgccacgctgaaagagatcaaagcgttaaacccggcaattccggtgctgattatgactgcgtactccagcgtcgagacggcggtagaggcactgaaaactggggcgctggattatctcatcaagccgctggatttcgataacctacaggcgacgctggaaaaagcgctcgcgcatacgcacagtattgatgctgaaacacctgcggtgactgccagccagttcggtatggtcggtaaaagcccggcgatgcaacacctgctcagtgaaatcgccctcgtcgcgccaagcgaagccacggtactgatccacggcgattccggcaccggtaaagagctggtcgccagggcgattcacgccagtagcgcacgtagcgaaaaaccgctggtaacgctcaactgtgcggcactcaacgaatccttgctggaatctgaattgttcggtcacgaaaaaggggcgtttactggagccgataaacgccgggaagggcgctttgttgaggcggacggcggcacgctgtttctcgatgaaattggcgatatcagcccgatgatgcaggtgcgtctgctgcgtgcgattcaggagcgcgaagttcagcgtgtcggtagcaaccagattatcagcgttgatgtccggctgattgcggcgacccatcgcgatcttgccgcagaggtgaatgccgggcgttttcgccaggatctctactatcgcctgaatgtggtggcgattgaagtaccaagcctgcggcaacggcgggaagatatccctctgctggctggccattttctgcagcgctttgccgagcgtaatcgcaaggcggtaaaaggttttacgccccaggcgatggatctgttgattcattacgactggccgggaaatattcgtgagctggaaaacgcggtggaacgggcagtggtgctgctgaccggggaatatatttccgaacgcgagctgccgctggcgattgccagtacgccgatcccgctgggacaaagtcaggatattcagccgttggtggaagtggaaaaagaggtgattctggcggcgctggagaaaacgggcggcaacaaaaccgaagccgcccgtcagttagggatcacgcgcaaaacgctattggcaaaactgagccgttaattctgctcgcgttcgatagcgcgccagccgatatctttccggcagaagcagtcgtcccagtggatatcggtcattaaggcataggcgcgtttctgcgcttctgccacggtatgacccagcgcggtgacgcacagtacgcgcccgccgttggtcactacctgctcgtcatccgccagttttgtgcccgcgtggaacactttgccgcctgccacttcttccagcggcaggccgtggatcacgtcaccggtgcggtaatcacccggatatccacccgcagccatcaccacgccgagagaagcgcgttcatcccactcggacgttttctcgtccagtttgctttcacaggccgccaggcagagctcaaccagatcggacttcatgcgcagcataatcggctgggtttccggatcgccaaagcggcagttaaattcaataaccttcggattgccctgtttgtcgatcatcaggcccgcgtagagaaaaccggtgtaggtgttgccttccgccgccatgcctttcacggttggccagataatacgttccatggtgcgctgatgaacgtcatcggttactaccggcgcgggggagtaagcgcccatcccgccggtgtttggtccggtatctttatcgcctacgcgtttgtgatcctggctggtagccatcggcagcacatgctcgccgtccaccatcacgataaagctcgcttcttcgccatcgaggaactcttcgataacgatgcgatgacccgcgtcgccaaaagcgttgcccgccagcatatcgtgaacagccgcttccgcttcttccagcgtcatcgccacgataacgcctttcccggcagccagaccgtccgctttaatgacgattggcgcgcctttctcacgcagatacgccagcgcaggttctacctcggtgaagttctggtattccgccgtagggatcttatggcgggccaggaaatctttggtaaacgctttactgccttccagttgggccgcacctgcggttgggccgaagattttcagcccggcggcgcggaaggtatcgaccacgcctttcaccagcggcgcttccgggccgacgatggtcagatcaatcttttcgttttgtgcgaaatccaacagcgccgggatatcggtcacgccaatagcaacgttttgcagcgcgggttccagtgcagtgcctgcattacccggagcaacaaaaacagtctcaaccagcgggctctgggccgctttccaggccagcgcgtgctcgcgcccgccgttaccaatcactaatactttcatctattgctccattaatggcggaagtggcgcatgtcggtgaagagcatcgcaataccgtgctcgtcggcggcggcaatcacttcgtcatcacggatagaaccgccaggctggattacgcaggtcacgcccgcagcggcggcggcatcaataccgtcgcggaacgggaagaacgcgtcagaagccatgctggaacctttcacttccaggccttcatcggccgctttaataccggcgatttttgcggagtacacgcggctcatctggcccgcgccaatgccgatagtcatattgtttttggcatagacgatagcgttggatttcacaaacttcgccaccttccagcagaacagcgcatcacgcagttcctgttcgctcggctgacgtttggtcaccacgcgcagttcttccgcaccgaccatccccaggtcacgatcctgaaccagcagaccgccgttcacgcgtttgaaatcgaggcccggaacacgctcgccccactgaccgcaggtcagaacgcgtacgttctgtttggcggcggtgattttcagggcttcttcgctggcggacggcgcaataatcacttcgacaaactgacgagaaatgatggcctgtgcggtttccgcatccagctcgcggttaaaggcaatgatgccgccgaatgcggaggttgggtcggttttgtacgcgcgatcgtaagcatcaagaatggaattgccgatagccacgccgcaagggttggcgtgcttcacaatcacacatgccggctcggcgaactctttcacgcactccagcgccgcatcggtatcggcgatgttgttataagagagggctttaccctgaacctgggttgcggtagcaacggaggcttctttcacattctcttctatatagaaggcagcctgctggtggctgttctcgccgtaacgcatatccagcttcttaatgaagttcaggttcagcgtgcgtgggaagcgaccggcggcttctttgctttcaccgtggtaagccggaaccatgctgccgaagtagttggcaatcatgctgtcgtaggcggcagtgtgttcgaaggctttgatggcgaggtcgaaacgggttgcaagcgtcaggcttccttcgttgtcatccatctctttaataatggcgtcatagtcgctgctcttcaccacgattgcgacatctttatggttcttggcggcggagcgcaccatcgttgggccgccgatatcgatgttctcaaccgcatcttccaggctgcaaccttcacgggccacggtctgggcgaacggatacaggttaacaaccaccatatcgataggctggatctgatgttcttccataatggcatcgtcctggccgcgacggcccagaatgccaccatgtactttcggatgcagggtcttcacgcgtccatccatcatctccgggaaaccggtgtaatcggaaacttcggttaccggcagacctttttctgctaacagacgggcagtgccccctgtagacagcagctccacaccgcgtgcggaaagtgcctgggcgaattcgacgataccggctttgtcagaaacactgagcagagcgcggcggactggacgacgttgttgcatggtaaatcccctggatttgactattacagagagcgttagctgaatttttcgcgaaaaactcagctaacgcccctaacggggcatccttatttttcgcccgcattgtaacgaaaacgtttgcgcaacgctcgcgaatttttctctttcaatggtgatcacaattttgactgtggttaccgtgggcaaaatacagaaattacattgatgattgtggataactctgtgcgtaaaaaggtataaagcgggcttttgctggggaatgcagcagtcagtcatttttctgcaatttttctattgcggcctgcggagaactccctataatgcgcctccatcgacacggcggatgtgaatcacttcacacaaacagccggttcggttgaagagaaaaatcctgaaattcagggttgactctgaaagaggaaagcgtaatatacgccacctcgcgacagtgcgctaaagcgcgtcgcaactgctctttaacaatttatcagacaatctgtgtgggcactcgaagatacggattcttaacgtcgcaagacgaaaaatgaataccaagtctcaagagtgaacacgtaattcattacgaagtttaattctttgagcatcaaacttttaaattgaagagtttgatcatggctcagattgaacgctggcggcaggcctaacacatgcaagtcgaacggtaacaggaagaagcttgcttctttgctgacgagtggcggacgggtgagtaatgtctgggaaactgcctgatggagggggataactactggaaacggtagctaataccgcataacgtcgcaagaccaaagagggggaccttcgggcctcttgccatcggatgtgcccagatgggattagctagtaggtggggtaacggctcacctaggcgacgatccctagctggtctgagaggatgaccagccacactggaactgagacacggtccagactcctacgggaggcagcagtggggaatattgcacaatgggcgcaagcctgatgcagccatgccgcgtgtatgaagaaggccttcgggttgtaaagtactttcagcggggaggaagggagtaaagttaatacctttgctcattgacgttacccgcagaagaagcaccggctaactccgtgccagcagccgcggtaatacggagggtgcaagcgttaatcggaattactgggcgtaaagcgcacgcaggcggtttgttaagtcagatgtgaaatccccgggctcaacctgggaactgcatctgatactggcaagcttgagtctcgtagaggggggtagaattccaggtgtagcggtgaaatgcgtagagatctggaggaataccggtggcgaaggcggccccctggacgaagactgacgctcaggtgcgaaagcgtggggagcaaacaggattagataccctggtagtccacgccgtaaacgatgtcgacttggaggttgtgcccttgaggcgtggcttccggagctaacgcgttaagtcgaccgcctggggagtacggccgcaaggttaaaactcaaatgaattgacgggggcccgcacaagcggtggagcatgtggtttaattcgatgcaacgcgaagaaccttacctggtcttgacatccacggaagttttcagagatgagaatgtgccttcgggaaccgtgagacaggtgctgcatggctgtcgtcagctcgtgttgtgaaatgttgggttaagtcccgcaacgagcgcaacccttatcctttgttgccagcggtccggccgggaactcaaaggagactgccagtgataaactggaggaaggtggggatgacgtcaagtcatcatggcccttacgaccagggctacacacgtgctacaatggcgcatacaaagagaagcgacctcgcgagagcaagcggacctcataaagtgcgtcgtagtccggattggagtctgcaactcgactccatgaagtcggaatcgctagtaatcgtggatcagaatgccacggtgaatacgttcccgggccttgtacacaccgcccgtcacaccatgggagtgggttgcaaaagaagtaggtagcttaaccttcgggagggcgcttaccactttgtgattcatgactggggtgaagtcgtaacaaggtaaccgtaggggaacctgcggttggatcacctccttaccttaaagaagcgttctttgcagtgctcacacagattgtctgatagaaagtgaaaagcaaggcgtcttgcgaagcagactgatacgtccccttcgtctagaggcccaggacaccgccctttcacggcggtaacaggggttcgaatcccctaggggacgccacttgctggtttgtgagtgaaagtcacctgccttaatatctcaaaactcatcttcgggtgatgtttgagatatttgctctttaaaaatctggatcaagctgaaaattgaaacactgaacaacgaaagttgttcgtgagtctctcaaattttcgcaacacgatgatgaatcgtaagaaacatcttcgggttgtgaggttaagcgactaagcgtacacggtggatgccctggcagtcagaggcgatgaaggacgtgctaatctgcgataagcgtcggtaaggtgatatgaaccgttataaccggcgatttccgaatggggaaacccagtgtgtttcgacacactatcattaactgaatccataggttaatgaggcgaaccgggggaactgaaacatctaagtaccccgaggaaaagaaatcaaccgagattcccccagtagcggcgagcgaacggggagcagcccagagcctgaatcagtgtgtgtgttagtggaagcgtctggaaaggcgcgcgatacagggtgacagccccgtacacaaaaatgcacatgctgtgagctcgatgagtagggcgggacacgtggtatcctgtctgaatatggggggaccatcctccaaggctaaatactcctgactgaccgatagtgaaccagtaccgtgagggaaaggcgaaaagaaccccggcgaggggagtgaaaaagaacctgaaaccgtgtacgtacaagcagtgggagcacgcttaggcgtgtgactgcgtaccttttgtataatgggtcagcgacttatattctgtagcaaggttaaccgaataggggagccgaagggaaaccgagtcttaactgggcgttaagttgcagggtatagacccgaaacccggtgatctagccatgggcaggttgaaggttgggtaacactaactggaggaccgaaccgactaatgttgaaaaattagcggatgacttgtggctgggggtgaaaggccaatcaaaccgggagatagctggttctccccgaaagctatttaggtagcgcctcgtgaattcatctccgggggtagagcactgtttcggcaagggggtcatcccgacttaccaacccgatgcaaactgcgaataccggagaatgttatcacgggagacacacggcgggtgctaacgtccgtcgtgaagagggaaacaacccagaccgccagctaaggtcccaaagtcatggttaagtgggaaacgatgtgggaaggcccagacagccaggatgttggcttagaagcagccatcatttaaagaaagcgtaatagctcactggtcgagtcggcctgcgcggaagatgtaacggggctaaaccatgcaccgaagctgcggcagcgacgcttatgcgttgttgggtaggggagcgttctgtaagcctgcgaaggtgtgctgtgaggcatgctggaggtatcagaagtgcgaatgctgacataagtaacgataaagcgggtgaaaagcccgctcgccggaagaccaagggttcctgtccaacgttaatcggggcagggtgagtcgacccctaaggcgaggccgaaaggcgtagtcgatgggaaacaggttaatattcctgtacttggtgttactgcgaaggggggacggagaaggctatgttggccgggcgacggttgtcccggtttaagcgtgtaggctggttttccaggcaaatccggaaaatcaaggctgaggcgtgatgacgaggcactacggtgctgaagcaacaaatgccctgcttccaggaaaagcctctaagcatcaggtaacatcaaatcgtaccccaaaccgacacaggtggtcaggtagagaataccaaggcgcttgagagaactcgggtgaaggaactaggcaaaatggtgccgtaacttcgggagaaggcacgctgatatgtaggtgaggtccctcgcggatggagctgaaatcagtcgaagataccagctggctgcaactgtttattaaaaacacagcactgtgcaaacacgaaagtggacgtatacggtgtgacgcctgcccggtgccggaaggttaattgatggggttagcgcaagcgaagctcttgatcgaagccccggtaaacggcggccgtaactataacggtcctaaggtagcgaaattccttgtcgggtaagttccgacctgcacgaatggcgtaatgatggccaggctgtctccacccgagactcagtgaaattgaactcgctgtgaagatgcagtgtacccgcggcaagacggaaagaccccgtgaacctttactatagcttgacactgaacattgagccttgatgtgtaggataggtgggaggctttgaagtgtggacgccagtctgcatggagccgaccttgaaataccaccctttaatgtttgatgttctaacgttgacccgtaatccgggttgcggacagtgtctggtgggtagtttgactggggcggtctcctcctaaagagtaacggaggagcacgaaggttggctaatcctggtcggacatcaggaggttagtgcaatggcataagccagcttgactgcgagcgtgacggcgcgagcaggtgcgaaagcaggtcatagtgatccggtggttctgaatggaagggccatcgctcaacggataaaaggtactccggggataacaggctgataccgcccaagagttcatatcgacggcggtgtttggcacctcgatgtcggctcatcacatcctggggctgaagtaggtcccaagggtatggctgttcgccatttaaagtggtacgcgagctgggtttagaacgtcgtgagacagttcggtccctatctgccgtgggcgctggagaactgaggggggctgctcctagtacgagaggaccggagtggacgcatcactggtgttcgggttgtcatgccaatggcactgcccggtagctaaatgcggaagagataagtgctgaaagcatctaagcacgaaacttgccccgagatgagttctccctgactccttgagagtcctgaaggaacgttgaagacgacgacgttgataggccgggtgtgtaagcgcagcgatgcgttgagctaaccggtactaatgaaccgtgaggcttaaccttacaacgccgaaggtgttttggcggattgagagaagattttcagcctgatacagattaaatcagaacgcagaagcggtctgataaaacagaatttgcctggcggcagtagcgcggtggtcccacctgaccccatgccgaactcagaagtgaaacgccgtagcgccgatggtagtgtggggtctccccatgcgagagtagggaactgccaggcatcaaattagaaaaaccccggtccataaggccggggttttttgcatatcaattatttgcatgatgaagggaatctcatgagtgttctgtatatccaaattcgtcgtaatcaaattactgttcgcgatcttgaaagcaaacgtgaagtgagtggagacgctgccttcagtaaccagcgcctgttaatcgccaatttctttgttgcagaaaaagttctgcaagatcttgttctgcaactccacccacgtagtacctggcattcttttttgccagcaaaacgtatggatattgttgtgagcgcactggaaatgaatgagggcggtttgagtcaggttgaggaacgcattctccatgaagtggtcgctggggcaacgttaatgaaatatcgccagttccacatccatgcgcaaagtgcggtactcagtgatagtgcggtcatggcaatgcttaagcagaaataatcgtgtcaccattggtgggtactaaacctgaagttcagcccaccgggatgagaaaaaatcgcttacgcccccacatacgccagattcagcaacggatacggtttccccaaatcgtccacctcagagcgtcccgtaaccttaaaacccaccttcttatagaacccaaccgcctgctcattttgctcattaacgttggttgtcagttccggtgccatgctgagcgcatgctccaccagcacccgacctacgccgcagccgcgcacatcaggatcgataaacagcgcatccatatgctgcccacttagcaacataaatccaaccggctgatcccgctcattaaccgcgacccacaacggcgcttccggcaggaaggaacgaactaggtcctccagctcggtccgatactctgcacttagaaaatcgtgagtggcatcgacagaacgacaccaaatcgcaacgagttcctccccttcctcatgccgactgcggcgaatactaataaccattttctctccttttagtcattcttatattctaacgtagtcttttccttgaaactttctcaccttcaacatgcaggctcgacattggcaaattttctggttatcttcagctatctggatgtctaaacgtataagcgtatgtagtgaggtaatcaggttatgccgattcgtgtgccggacgagctacccgccgtcaatttcttgcgtgaagaaaacgtctttgtgatgacaacttctcgtgcgtctggtcaggaaattcgtccacttaaggttctgatccttaacctgatgccgaagaagattgaaactgaaaatcagtttctgcgcctgcttagtaacagtcctttgcaggtcgatattcagctgttgcgcatcgattcccgtgaaagccgcaacacgcccgcagagcatctgaacaacttctactgtaactttgaagatattcaggatcagaactttgacggtttgattgtaactggtgcgccgctgggcctggtggagtttaatgatgtcgcttactggccgcagatcaaacaggtgctggagtggagcaaagatcacgtcaccagcacgctgtttgtctgctgggcggtacaggccgcgctcaatatcctctacggcattcctaagcaaactcgcaccgaaaaactctctggcgtttacgagcatcatattctccatcctcatgcgcttctgacgcgtggctttgatgatagtttcctggcaccgcatagccgctatgctgactttccggcagcgttgattcgtgattacaccgatctggaaattctggcagagacggaagaaggggatgcatatctgtttgccagtaaagataagcgcattgcctttgtgacgggccatcccgaatatgatgcgcaaacgctggcgcaggaatttttccgcgatgtggaagccggactagacccggatgtaccgtataactatttcccgcacaatgatccgcaaaatacaccgcgagcgagctggcgtagtcacggtaatttactgtttaccaactggctcaactattacgtctaccagatcacgccatacgatctacggcacatgaatccaacgctggattaatcttctgtgatagtcgatcgttaagcgattcagcaccttacctcaggcaccttcgggtgccttttttatttccgaaacgtacctcagcaggtgaataaattttattcatattgttatcaacaagttatcaagtatttttaattaaaatggaaattgtttttgattttgcattttaaatgagtagtcttagttgtgctgaacgaaaagagcacaacgatccttcgttcacagtggggaagttttcggatccatgacgaggagctgcacgatgactgaacaggcaacaacaaccgatgaactggctttcacaaggccgtatggcgagcaggagaagcaaattcttactgccgaagcggtagaatttctgactgagctggtgacgcattttacgccacaacgcaataaacttctggcagcgcgcattcagcagcagcaagatattgataacggaacgttgcctgattttattagcgaaacagcttccattcgcgatgctgattggaaaattcgcgggattcctgcggacttagaagaccgccgcgtagagataactggcccggtagagcgcaagatggtgatcaacgcgctcaacgccaatgtgaaagtctttatggccgatttcgaagatagtctggcaccagactggaacaaagtgatcgacgggcaaattaacctgcgtgatgcggttaacggcaccatcagttacaccaatgaagcaggcaaaatttaccagctcaagcccaatccagcggttttgatttgtcgggtacgcggtctgcacttgccggaaaaacatgtcacctggcgtggtgaggcaatccccggcagcctgtttgattttgcgctctatttcttccacaactatcaggcactgttggcaaagggcagtggtccctatttctatctgccgaaaacccagtcctggcaggaagcggcctggtggagcgaagtcttcagctatgcagaagatcgctttaatctgccgcgcggcaccatcaaggcgacgttgctgattgaaacgctgcccgccgtgttccagatggatgaaatccttcacgcgctgcgtgaccatattgttggtctgaactgcggtcgttgggattacatcttcagctatatcaaaacgttgaaaaactatcccgatcgcgtcctgccagacagacaggcagtgacgatggataaaccattcctgaatgcttacagtcgcctgttgattaaaacctgccataaacgcggtgcttttgcgatgggcggcatggcggcgtttattccgagcaaagatgaagagcacaataaccaggtgctcaacaaagtaaaagcggataaaagcctggaagccaataacggtcacgatggcacatggatcgctcacccaggccttgcggacacggcaatggcggtattcaacgacattctcggctcccgtaaaaatcagcttgaagtgatgcgcgaacaagacgcgccgattactgccgatcagctgctggcaccttgtgatggtgaacgcaccgaagaaggtatgcgcgccaacattcgcgtggctgtgcagtacatcgaagcgtggatctctggcaacggctgtgtgccgatttatggcctgatggaagatgcggcgacggctgaaatttcccgtaccagcatctggcagtggatccatcatcaaaaaacgttgagcaatggcaaaccggtgaccaaagccttgttccgccagatgctgggcgaagagatgaaagtcattgccagcgaactgggcgaagaacgtttctcccaggggcgttttgacgatgccgcacgcttgatggaacagatcaccacttccgatgagttaattgatttcctgaccctgccaggctaccgcctgttagcgtaaaccaccacataactatggagcatctgcacatgaaaacccgtacacaacaaattgaagaattacagaaagagtggactcaaccgcgttgggaaggcattactcgcccatacagtgcggaagatgtggtgaaattacgcggtagtgtcaatcctgaatgcacgctggcgcaactgggcgcagcgaaaatgtggcgtctgctgcacggtgagagcaaaaaaggctacatcaacagcctcggcgcactgactggcggtcaggcgctgcaacaggcgaaagcgggtattgaagcagtctatctgagcggatggcaggtagcggcggacgctaacctggcggccagcatgtatccggatcagagcctctatccggcaaacagcgtgccagctgtggtggagcggatcaacaacaccttccgtcgtgccgatcagatccaatggtccgcgggcattgagccgggcgatccgcgctatgtcgattacttcctgccgatcgttgccgatgcggaagccggttttggcggtgtcctgaatgcctttgaactgatgaaagcgatgattgaagccggtgcagcggcagttcacttcgaagatcagctggcgagtgtgaagaaatgcggtcacatgggcggcaaagttttagtgccaactcaggaagctattcagaaactggtcgcggcgcgtctggcagctgacgtgacgggcgttccaaccctgctggttgcccgtaccgatgctgatgcggcggatctgatcacctccgattgcgacccgtatgacagcgaatttattaccggcgagcgtaccagtgaaggcttcttccgtactcatgcgggcattgagcaagcgatcagccgtggcctggcgtatgcgccatatgctgacctggtctggtgtgaaacctccacgccggatctggaactggcgcgtcgctttgcacaagctatccacgcgaaatatccgggcaaactgctggcttataactgcagcccgagcttcaactggcagaaaaacctcgacgacaaaactattgccagcttccagcagcagctgagcgatatgggctacaagttccagttcatcaccctggcaggtatccacagcatgtggttcaacatgtttgacctggcaaacgcctatgcccagggcgagggtatgaagcactacgttgagaaagtgcagcagccggaatttgccgccgcgaaagatggctataccttcgtatctcaccagcaggaagtgggtacaggttacttcgataaagtgacgactattattcagggcggcacgtctagtgtcaccgcgctgaccggctccactgaagaaagccagttctaagcaacaacaaccgttgctgactgtaggccggataaggcgttcacgccgcatccggcaatcggtgcacgatgcctgatgcgacgcttgcgcgtcttatcatgcctacagccgttgccgaacgtaggctggataaggcgtttacgccgcatccggcaattctctgctcctgatgagggcgctaaatgccgcgtggcctggaattattgattgctcaaaccattttgcaaggcttcgatgctcagtatggtcgattcctcgaagtgacctccggtgcgcagcagcgtttcgaacaggccgactggcatgctgtccagcaggcgatgaaaaaccgtatccatctttacgatcatcacgttggtctggtcgtggagcaactgcgctgcattactaacggccaaagtacggacgcggcatttttactacgtgttaaagagcattacacccggctgttgccggattacccgcgcttcgagattgcggagagcttttttaactccgtgtactgtcggttatttgaccaccgcagccttactcccgagcggctttttatctttagctctcagccagagcgccgctttcgtaccattccccgcccgctggcgaaagactttcaccccgatcacggctgggaatctctactgatgcgcgttatcagcgacctaccgctgcgcctgcgctggcagaataaaagccgtgacatccattacattattcgccatctgacggaaacgctggggacagacaacctcgcggaaagtcatttacaggtggcgaacgaactgttttaccgcaataaagccgcctggctggtaggcaaactgatcacaccttccggcacattgccatttttgctgccgatccaccagacggacgacggcgagttatttattgatacctgcctgacgacgaccgccgaagcgagcattgtttttggctttgcgcgttcttattttatggtttatgcgccgctgcccgcagcgctggtcgagtggctacgggaaattctgccaggtaaaaccaccgctgaattgtatatggctatcggctgccagaagcacgccaaaaccgaaagctaccgcgaatatctcgtttatctacagggctgtaatgagcagttcattgaagcgccgggtattcgtggaatggtgatgttggtgtttacgctgccgggctttgatcgggtattcaaagtcatcaaagacaggttcgcgccgcagaaagagatgtctgccgctcacgttcgtgcctgctatcaactggtgaaagagcacgatcgcgtgggccgaatggcggacacccaggagtttgaaaactttgtgctggagaagcggcatatttccccggcattaatggaattactgcttcaggaagcagcggaaaaaatcaccgatctcggcgaacaaattgtgattcgccatctttatattgagcggcggatggtgccgctcaatatctggctggaacaagtggaaggtcagcagttgcgcgacgccattgaagaatacggtaacgctattcgccagcttgccgctgctaacattttccctggcgacatgctgtttaaaaacttcggtgtcacccgtcacgggcgtgtggttttttatgattacgatgaaatttgctacatgacggaagtgaatttccgcgacatcccgccgccgcgctatccggaagacgaacttgccagcgaaccgtggtacagcgtcagcccgggcgatgttttcccggaagagtttcgccactggctatgcgccgacccgcgtattggtccgctgtttgaagagatgcacgccgacctgttccgcgctgattactggcgcgcactacaaaaccgcatacgtgaagggcatgtggaagatgtttatgcgtatcggcgcaggcaaagatttagcgtacggtatggggagatgcttttttgagtaaagcttccatataatttttctccgcaatgtatcgagggttatccgtaaagccaaagctttcagccatcttatttaatgtattaaggattaattcagcaataacccggtgaccaaattcaaaagccaactcaaaggcagagtatttttgtggggctttgtgttgccaaaaatccataatatcttcagcggtaaatccaaacaggcgtgcatggtcagataaagcaagataaaccgtctctacaacattttgttgtttatgctgtatcgcactaaacaaaccgggatattcattagaattatttgccaggaggaggggcttcatattttttttatcgaatttaaacgtattaaacagagtgggtaatgcgttaaaaatagtattaataacgttcatgtgtccgcgctgcatggccataaacaaacccgtgtcgcgcgcaagacttttagcggtcagaagatctacaatatcggaagcactaatgttaatttcctgggctaggctgggcaatgcttcaagaataactttcacgatatcgctatgtccattttgcatcgccagatatagtcctgggcaaccataaaaatcctttgccttcaggagatcgagtacctgttctttagtcaaatgacatgtgcgaattaacaaaggtaacgcgttcaaaacaattttcagcatgtcggcatcaccattcgccataacatggtataaaacatggctggacgttctatttttggcactcaggaatttatacacttgttcgttatctaaatgatgtgttgcggccagtttaggtaaggcgttcagaatgctggttacaacatttttatccttacgacttatcgctaaaaataatccagaaaaaccatttttatcttttgcctccagaatatgcatgagattttttttgctgagtaatccttcatatcctgtttcactcaaactattgaaaatagtctcaacgatatccgcattaccataatttatagccaaatataaacctggcaggttaatactattataggcagtcaacatttctgttctatgtagttctggcattttctggagttgaatcatcagttgcgtaagttggtgattctgaccaattgccattagcaaattcatcgttgcaggacttaatggaggggttatttcatccacagatccttttaacatcaatagctgttctttcggaagtgctggaattattgcaacagattgattaataacatgatcattactccatttcaggaggctataatctacattcataaaatccatcagagaatagtgtttaatattctctttgctttcgctcataattcttattttatcgttagttacattaggatcataaacgctaaccacgtaatgggtacatccttcagttgtgttctttattcttagccggaccgtcaaagcatggttatccaccagtaatatggctgccataacactgatgccattactttccatcttgtcaaaatatgctttcataactagcccgaaatcaccgcaggcagcaacgcaacgcccctcaggacggctggaaaccaacgccaaagtctggtttttgcattttttgttgaagtgcgtgagaaatttttcagcactagagtaatcatcttgatggggtttgtaatcaacattctgataaatatcattaatatattgtgcagcaatgtgtcggcatactatacggttttggggtcgccccggaaaataacattgaccattaagtttaattcttgggaattctttttcttttctatcactttttaggtttaattcttgtttatcaagagtgtcactgcgttgaggtaaaatttccattaggtatttttcaaatattggggcaatggtttgagtaagtgtcgtgttttcgtttttattaattatcgtaatttctttcttatcagcttgtaagacggacgtggaaaatttaatgacaaaatccttgttgctaaagatatgacgaccattttgtctacagttctcactgaagctttttaatagaggcgtcgccagctccttgccagaaaatttatcctcgagttctttataaaacaattcactcagggtttggtgttcatttgtctgggctgtattattaatatttgcagagaaagaactacgaggaatacgagtaatcatttaaatatctcattgtttattgatgtcttgaattttaactatcagaacagtgaaaaaatttaatatgattacaactaaagaaatatcataaatcgctcaatctcataatgcagccgtaaaagtttcggtggaatgagatcttgcgattttgttaataattaagtggtttgatgtttaaaaataatgctgagttaataaaagtgtgtgaagtgtatgacattaagttattttggcgtcaatgcgattaacagacacccttattctattgccactcaggtatgatgggcagaatattgcctctgcccgccagaaaaagtcagcgcattccaccgtacgccagcgtcacttccttcgccgctttaatcaccatcgcgccaaactcggtcacgcggtcatcggtaatacgactaatcggtccggaaatagaaattgcggcaaacggttcacggtgctcatcgaaaatacacgctgcaaggcaacgtagccccagtgcatgttcctcatcgtcaaaactataaccccgtttgcgcgtttgggcgagatcttcttttaaatgcacaggagacaccagcgttgcgtgggtataggcatgtaaccctttgcggtgcagcagcttcgtcacctgttcttcgctcagttgggctaaaaaggctttacccgcaccggaagcgtgcatcggcaatttaccgccgataggcgcggacattcgcatcagatgcgtacactgtacctggtcgataataatcgcttcgtgatcgctttgatcaagcaccgccatattgaccgtttcgccagactcttccattagattgcgcaggatagggtgaacaatcgctaacaaattacggctctggagaaagctgctgccgaccataaaggcatgtgcgccgattgcccaatgtcccagttcgccaacctgacgcacgaaaccctgctgttgcatcgtggttagcaggcggtgggtcgtggaattgggtaacccggcttgttgcgccagttccgtgagtgccacactgccattggattcggcaatccactccagtaatttcaggccacgcgttaaagactgaacctgtccagtcgctggtgcggtggcaacggcgggttttctgccgcgtttcgcgggaatgggtgcgaccatgacagtctcttttttctgtatcgtggaaatcattttcatttttattgttagctaatgcaatagttactgaactgatccgatgagttaatgttgaacaaatctcatgttgcgtggtggtcgcttttaccacagatgcgtttatgccagtatggtttgttgaatttttattaaatctgggttgagcgtgtcgggagcaagtgtgagcagcaaagtggaacaactgcgtgcgcagttaaatgaacgtattctggtgctggacggcggtatgggcaccatgatccagagttatcgactgaacgaagccgattttcgtggtgaacgctttgccgactggccatgcgacctcaaaggcaacaacgacctgctggtactcagtaaaccggaagtgatcgccgctatccacaacgcctactttgaagcgggcgcggatatcatcgaaaccaacaccttcaactccacgaccattgcgatggcggattaccagatggaatccctgagcgcggaaatcaactttgcggcggcgaaactggcgcgagcttgtgctgacgagtggaccgcgcgcacgccagagaaaccgcgctacgttgccggtgttctcggcccgaccaaccgcacggcgtctatttctccggacgtcaacgatccggcatttcgtaatatcacttttgacgggctggtggcggcttatcgagagtccaccaaagcgctggtggaaggtggcgcggatctgatcctgattgaaaccgttttcgacacccttaacgccaaagcggcggtatttgcggtgaaaacggagtttgaagcgctgggcgttgagctgccgattatgatctccggcaccatcaccgacgcctccgggcgcacgctctccgggcagaccaccgaagcattttacaacagtttgcgccacgccgaagctctgacctttggcctgaactgtgcgctggggcccgatgaactgcgccagtacgtgcaggagctgagtcggattgcggaatgctacgtcaccgcgcacccgaacgccgggctacccaacgcctttggtgagtacgatctcgacgccgacacgatggcaaaacagatacgtgaatgggcgcaagcgggttttctcaatatcgtcggcggctgctgtggcaccacgccacaacatattgcagcgatgagtcgtgcagtagaaggattagcgccgcgcaaactgccggaaattcccgtagcctgccgtttgtccggcctggagccgctgaacattggcgaagatagcctgtttgtgaacgtgggtgaacgcaccaacgtcaccggttccgctaagttcaagcgcctgatcaaagaagagaaatacagcgaggcgctggatgtcgcgcgtcaacaggtggaaaacggcgcgcagattatcgatatcaacatggatgaagggatgctcgatgccgaagcggcgatggtgcgttttctcaatctgattgccggtgaaccggatatcgctcgcgtgccgattatgatcgactccagtaaatgggacgtcattgaaaaaggtctgaagtgtatccagggcaaaggcattgttaactctatcagcatgaaagagggcgtcgatgcctttatccatcacgcgaaattgttgcgtcgctacggtgcggcagtggtggtaatggcctttgacgaacagggacaggccgatactcgcgcacggaaaatcgagatttgccgtcgggcgtacaaaatcctcaccgaagaggttggcttcccgccagaagatatcatcttcgacccaaacatcttcgcggtcgcaactggcattgaagagcacaacaactacgcgcaggactttatcggcgcgtgtgaagacatcaaacgcgaactgccgcacgcgctgatttccggcggcgtatctaacgtttctttcagcttccgtggcaacgatccggtgcgcgaagccattcacgcagtgttcctctactacgctattcgcaatggcatggatatggggatcgtcaacgccgggcaactggcgatttacgacgacctacccgctgaactgcgcgacgcggtggaagatgtgattcttaatcgtcgcgacgatggcaccgagcgtttactggagcttgccgagaaatatcgcggcagcaaaaccgacgacaccgccaacgcccagcaggcggagtggcgcagctgggaagtgaataaacgtctggaatacagcctggtcaaaggcattaccgagtttatcgagcaggataccgaagaagcccgccagcaggctacgcgcccgattgaagtgattgaaggcccgttgatggacggcatgaatgtggtcggcgacctgtttggcgaagggaaaatgttcctgccacaggtggtcaaaagcgcgcgcgtcatgaaacaggcggtggcctacctcgaaccgtttattgaagccagcaaagagcagggcaaaaccaacggcaagatggtgatcgccaccgtgaagggcgacgtccacgacatcggtaaaaatatcgttggtgtggtgctgcaatgtaacaactacgaaattgtcgatctcggcgttatggtgcctgcggaaaaaattctccgtaccgctaaagaagtgaatgctgatctgattggccttagcgggcttatcacgccgagcctggacgagatggttaacgtggcgaaagagatggagcgtcagggcttcactattccgttactgattggcggcgcgacgaccagtaaagcgcacacggcggtgaaaatcgagcagaactacagcggcccgacggtgtatgtgcagaatgccagccgtaccgttggtgtggtggcggcgctgctttccgatacccagcgtgatgattttgtcgctcgtacccgcaaggagtacgaaaccgtacgtattcagcacgggcgcaagaaaccgcgcacaccaccggtcacgctggaagcggcgcgcgataacgatttcgcttttgactggcaggcttacacgccgccggtggcgcaccgtctcggcgtgcaggaagtcgaagccagcatcgaaacgctgcgtaattacatcgactggacaccgttctttatgacctggagcctggccgggaagtatccgcgcattctggaagatgaagtggtgggcgttgaggcgcagcggctgtttaaagacgccaacgacatgctggataaattaagcgccgagaaaacgctgaatccgcgtggcgtggtgggcctgttcccggcaaaccgtgtgggcgatgacattgaaatctaccgtgacgaaacgcgtacccatgtgatcaacgtcagccaccatctgcgtcaacagaccgaaaaaacaggcttcgctaactactgtctcgctgacttcgttgcgccgaagctttctggtaaagcagattacatcggcgcatttgccgtgactggcgggctggaagaggacgcactggctgatgcctttgaagcgcagcacgatgattacaacaaaatcatggtgaaagcgcttgccgaccgtttagccgaagcctttgcggagtatctccatgagcgtgtgcgtaaagtctactggggctatgcgccgaacgagaacctcagcaacgaagagctgatccgcgaaaactaccagggcatccgtccggcaccgggctatccggcctgcccggaacatacggaaaaagccaccatctgggagctgctggaagtggaaaaacacactggcatgaaactcacagaatctttcgccatgtggcccggtgcaagcgttagcggttggtacttcagccacccggacagcaagtactacgctgtagcacaaattcagcgcgatcaggttgaagattatgcccgccgtaaaggtatgagcgttaccgaagttgagcgctggctggcaccgaatctggggtatgacgcggactgattcacaaatctgtcacttttccttacaacaaacagggcgctcaatgagtgccctgtctctttattaatatgaaacacttatactggaaacaggctggaataatcttagccggaaaaacgaatgtcaaaaggcacagtaaagatgccagtcagcgtgtttccggtcctttggtcattcaattgcttcaggaacatataacgataaggagaacctgaactcgtgttaacgctgcttcacctgctttctgccgtcgccctgctggtctgggggactcatattgttcgaaccggcgtaatgcgcgtcttcggcgcgcgtttgcgtactgtccttagccggagcgtcgaaaaaaagccgctcgccttttgcgcggggatcggcgttaccgcactggtacagagcagtaatgccaccaccatgctggtgaccagctttgtcgctcaggatctggtagccctcgcaccggctctggtcattgtgctgggtgcagatgtcgggacggcgctaatggcgcgtattctcaccttcgacttatcctggctgagtccgttacttatttttatcggcgtgatttttttcctcggacgcaaacagagtcgcgccgggcaactgggccgcgtcggtattggtcttgggctgattttgctagcgctggagttgattgtgcaggccgtaacgccgatcacccaggcaaacggcgttcaggtgatctttgccagcctgaccggcgatattctgctggatgcgctgattggcgcgatgttcgccattatcagctactccagccttgctgctgtactgctgaccgcgactctgaccgccgcaggcattatctccttccccgtggcgctctgtctggtgattggtgctaacctcggttccggtctgctggcaatgctcaacaacagtgccgccaatgccgcagcccgccgtgtcgcgctgggtagtctgctgtttaagctggtgggtagcctgattatcctgccgtttgtccatttgctggcagagacaatggggaagttgagtttgccaaaagcggaactggtgatctatttccacgtcttctacaaccttgtacgttgcctggtcatgctgccatttgttgacccgatggcacggttttgcaaaacgattattcgcgatgaaccggaactggatacccagctacggcctaaacatctggatgtcagcgcgctggatacgcccacgcttgctctggcgaacgccgcgcgcgaaaccctgcgcattggcgacgccatggaacagatgatggaagggttgaataaagtgatgcacggtgagccacggcaggagaaagagctgcgtaagctggcagatgatatcaacgttctctacaccgccattaagctgtatctggcgcggatgccaaaagaagagctggcggaggaagagagccgccgctgggcagagatcatcgaaatgagcctcaaccttgaacaggcctccgatatcgtcgagcgcatgggcagcgaaattgctgacaaaagtctggcagcacggcgggcatttagccttgatgggttgaaggaactggatgcgctctatgagcaattgctcagtaatttaaagctggcaatgagcgtgttcttctctggcgatgtcaccagcgctcgtcgtttgcgtcgcagcaaacatcgttttcgcattcttaatcgccgctattcccacgcccacgtcgatcgcctgcatcagcaaaacgtgcagagcattgaaaccagtagcctacatttaggcttactgggagatatgcagcgcctgaacagcctgttttgtagcgtggcttacagtgtgctggaacagccggatgaagatgaaggacgggacgagtattaatattgtgaatcctgtaggcctgataagacgcgtcaagcgtcgcatcaggcactatgaacaagatgccggatcatgcatccggcaattcacttaaaaacggtgaccagcttccagcggaaccgcttcttcaccagccttaaacacataagtggtgttcgggccacccagcgtagcgtgacctttactcactgtgatccagttaccttccggtagaccaataatcgtcagttctggcgcgacgaccagcagttcgcgaatacgctgctcacgggtttcacctttatggccttccggcagcgcgttggtgaagtgcgggttgatttgcagcgggaacagatttagcgcatcgaaaccttgcggatcgacaatcggcatatcgttggtggtacgaatagttgggcaagcaaggttagcgcctgcgctccagccaatatacagagcgccacgtttaaccacgtcagtaattggtgccagcagcccgcgctcgcggcactgtttcagcaactggaaagtattcccgccgccgacaatcacgatctcagcattttcaatcgcggcaacgggatcgacaacgctatgaataccggtgacagaaacacccagcggagcgagaaccgcagccgttttcgctgtgtaatcatcccaggtctgcgttacgccagcgaaagggataaacaccgcactgcggcgaccctgcaactgttcagcaattagcggcagtgcatgttccagccaggctttacccggcagcgtgctgttactcaataaaagcagttccattacttctccggttagtaagaaatcacgggaggcatgctaccactgcgaatttaaccacttactgacatggctcacgatgtcgcacattgcttctggaaagtgatttgagcaggtaacgaattcaagccaatggaaataacaaatagttcgctcatgactattttttatcaacccaaaggtacggtatattccgttttttacaggagaatttatgctgcccgacagtagtgtccgtttaaataaatacatcagcgaaagcggaatttgcagtcgccgcgaagcggatcgctatatcgagcaaggcaatgtgttccttaatggcaagcgagccaccattggcgatcaggtgaaacccggcgacgttgtgaaagtaaacggtcagttgattgaacctcgggaagccgaagatttggtacttatcgccctgaacaagcccgttggtattgtaagcaccaccgaagatggcgagcgcgataacattgtcgatttcgttaaccacagcaaacgcgtgttcccgattggccgcctggataaagactcccaggggctgattttcctcaccaatcacggcgatctggtgaataagatcctgcgtgctggcaatgatcatgagaaagagtatctggtgacggtcgataaaccgattaccgaggagtttattcgcggcatgagtgcgggggtgccaatcctcgggacagtgaccaaaaagtgcaaagttaaaaaagaagcgccgtttgtcttccgcattaccctggtgcaggggctgaaccgtcagatccggcgcatgtgcgagcatttcggctatgaagtgaaaaagctggaacgcacgcgcatcatgaacgttagcttaagcggcattccgctgggggaatggcgcgatttaaccgacgatgagttaatcgacctctttaagctcattgaaaattcctcttccgaggtaaaacctaaagcgaaggccaaaccgaaaacagcgggcatcaaacgtccagtcgttaagatggaaaaaacggcggaaaaaggcggtcgcccggcgtccaacggtaagcgttttaccagcccggggcgtaaaaagaaggggcgctgattaacgcctcagactgatgaaaacggcccaaaagtgcccggacagtcccctcgccccttcgggaaaagggttagggtgaggggaaaattgtgttcacactgacgagtgaaaatctcaggcgttgattgtggattagcgcctgccgcgcgtgctcgtatttgcactccagctaaaactcgcttcaggatccggtttataagcctgctttttcttcaactggcgggcttttttcgcttcagcctcacgctcaaccattaatttatcgatgtaatctttcttaatgctgttggtttcggagttggtcaatacgcgaccatgcgcaatccgcgcccgatccagcagtgttttaagttcacgctgctcgcgttcagtcatctctttttgggtaatacgggggagtgccatgatggtgccctcagtgagccagagagttcagtgtacgggaattcgtttgcgagcagaactgataatattcattttgccttctcttaactatttatctctttcgataattaattagagatgcagataaaaaaattaaaggcaattattctccgataaagacgctggttaacagagtacaggctcgtttattgatgagcatagtgacaagaaaatcaatacggcccgaaatatagcttccaggccatacagtatttactcaaacaaattactatgcagtttttgcaccacctgctcggcatcttcgccgggcaccaggaagcacaggttatggctggatgcgccataacaaatcatgcgaatgttgaacggttccagtacgccgaatacctctttgccaacgccgcaggctttactcaggtcattgccaatcaacgcgaccagcgccagaccttcttccacctccacccgacacagtgcggaaagctccatcagcagagattgcgtcagcaacgtatcgccagtggaggtactaccggtggtatcaagggttaatgccacgctcacttcactcgtggtgattaagtctacgctaatattatgccgcgcgaggatgccgaaaacttccgcgaggaaaccgcgagaatgcagcatattcaggctgtgcaaagtgagcagagtctgattgcgacgaagcgccagagcgcggaacagcggcggattttcagttttattgcacaccagcgtaccacctgcgcgtgggtctttgctggagccgacaaagaccgggatatcgctgcgtactgcgggtagcaacgttgccggatgcagtacttttgcaccaaaagttgccatctctgccgcttcggcaaacgcgatttcatcaatgcgttttgctgcggaaactacgcgtggatcggtggtgtagatgcccgggacgtcggtccagatatcaacacgagatgcgtgtaaagcctccgccagcaaggctgccgtataatcgctgcctccacggccaagcgtcgttgtacgacctttattttcgctaccgataaatccctgggtgatcactaagccttcattgagacgtgggagcagctgcagcgcggccagttccgccagcgcggctatatctggctctgcacgaccaaatcggtcgttggtacgcatcactttacgtacatcaaaccactgtgcctgaacatcgcgttcgcgcaggatctcaacaaacagcagggtgctcatcagctcgccgtggctgaccagctcatctgtcagcgccggagacgttgccagcgccgccgcttctgccagaacagtaatgttctccagcagacgttcaatctcttcacggataacgttcgggtaacgcagacgttccagaatggcaaactggatgttgcggatagcgtcgagtttttcgaatcgctcgccaggttccagtccttcagctaaagcgaccagcagattagtgataccagcagaagcgctgaggacaactaaacgcacgttggcatcagaaagcacaatatcagcgctgcggttcatggcgtcaaaatcagctacgctggtaccgccaaatttggagacaacaatttcagacataactacctcgtgtcaggggatccattttcagccttggcacaagggaagagcggaagacgggtgggcgcagagcgatacttcgctactattttcacccagaagtgctccaccacttgcgaaacgcccgactgcgaacgcttctggtgacaacccaggggattcagcccctgtagccgatgatgaacgtggccagccgttcaatcacctcggcgatgcaccccctcaggtgttatcacaggactggctcctccaacaccgttacttgggcaacgcgcctcttctggcctgcgctagcgcaggtagtacatttataaataaagggtgagcggggcggttgtcaacgatggggtcatgcggatttttcatccactcctggcggtcagtagttcagctaataaatgcttcactgcgctaagggtttacactcaacattacgctaacggcactaaaaccatcacatttttctgtgactggcgctacaatcttccaaagtcacaattctcaaaatcagaagagtattgctaatgaaaaacatcaatccaacgcagaccgctgcctggcaggcactacagaaacacttcgatgaaatgaaagacgttacgatcgccgatctttttgctaaagacggcgatcgtttttctaagttctccgcaaccttcgacgatcagatgctggtggattactccaaaaaccgcatcactgaagagacgctggcgaaattacaggatctggcgaaagagtgcgatctggcgggcgcgattaagagcatgttctctggcgagaagatcaaccgcactgaaaaccgcgccgtgctgcacgtagcgctgcgtaaccgtagcaataccccgattttggttgatggcaaagacgtaatgccggaagtcaacgcggtgctggagaagatgaaaaccttcagtgaagcgattatttccggtgagtggaaaggttataccggcaaagcaatcactgacgtagtgaacatcgggatcggcggttctgacctcggcccatacatggtgaccgaagctctgcgtccgtacaaaaaccacctgaacatgcactttgtttctaacgtcgatgggactcacatcgcggaagtgctgaaaaaagtaaacccggaaaccacgctgttcttggtagcatctaaaaccttcaccactcaggaaactatgaccaacgcccatagcgcgcgtgactggttcctgaaagcggcaggtgatgaaaaacacgttgcaaaacactttgcggcgctttccaccaatgccaaagccgttggcgagtttggtattgatactgccaacatgttcgagttctgggactgggttggcggccgttactctttgtggagtgcgattggcctgagcattgttctctccatcggctttgataacttcgttgaactgctttccggcgcacacgcgatggacaagcatttctccaccacgcctgccgagaaaaacctgcctgtactgctggcgctgattggcatctggtacaacaatttctttggtgcggaaactgaagcgattctgccgtatgaccagtatatgcaccgtttcgcggcgtacttccagcagggcaatatggagtccaacggtaagtatgttgaccgtaacggtaacgttgtggattaccagactggcccgattatctggggtgaaccaggcactaacggtcagcacgcgttctaccagctgatccaccagggaaccaaaatggtaccgtgcgatttcatcgctccggctatcacccataacccgctctctgatcatcaccagaaactgctgtctaacttcttcgcccagaccgaagcgctggcgtttggtaaatcccgcgaagtggttgagcaggaatatcgtgatcagggtaaagatccggcaacgcttgactacgtggtgccgttcaaagtattcgaaggtaaccgcccgaccaactccatcctgctgcgtgaaatcactccgttcagcctgggtgcgttgattgcgctgtatgagcacaaaatctttactcagggcgtgatcctgaacatcttcaccttcgaccagtggggcgtggaactgggtaaacagctggcgaaccgtattctgccagagctgaaagatgataaagaaatcagcagccacgatagcagcaccaatggtctgattaaccgctataaagcgtggcgcggttaatcatcgtcgatatgtaggccggataaggcgttcacgccgcatccggcaaccgatgcctgatgcgacgcggtcgcgtcttatcaggcctacaggtcgatgccgatatgtacatcgtattcggcaattaatacatagcacgattgattaaataaccttaataacaatgccgacgttatgtcggcatttttttatcagataaatccccttgtctgtaatttaacggaaatcataccgtgaggttaatcctaaaatagatttttaatcgttgtttatttcggaaaatacgcagattaattgcttttgtttttattttaagtttatgatttttattgttatttaaatataagttgaaacttatatttgatattcattccaattatcctaaaacgccatcgctaattccccgcgccgtaattcgcatgctttagttgtgtatactcgatcccgcccgaaatgtttttgggtaaatctccattcattcaatgaagggaaattgttatgaaaaaagttctgtatggcatttttgccatatctgcgcttgcggcgacttctgcgtgggctgcacctgtacaggtgggcgaagcggcagggagcgcagcaacgagcgttagcgcggggagttcctccgcgaccagcgtcagcaccgtaagcagcgcggtgggtgtcgcgcttgcggcaaccggtggcggtgatggttctaataccgggaccaccacaaccacgaccaccagtacccagtaataaagtatgtatccccaaaataattcgagtcattgcatctgtggctagaagtatgaagggattaaccataaccacactccggtgtggttattctgcccctctggagaagagtcgtgaagcgacctgcactcattcttatctgcctgttattacaggcctgtagtgccacgactaaagagctgggcaatagtctgtgggacagtctgttcggcacgccaggcgtacagctgacggatgatgatattcaaaatatgccctacgccagccagtacatgcagcttaatggcgggccgcagttatttgtggtgctggccttcgctgaagacggacaacaaaaatgggtcactcaggatcaggctactctcgttacccaacatggccgtctggtgaagactctgctcggcggcgacaacctgattgaagtgaataaccttgctgccgacccgctgattaaacccgcacaaatcgttgatggcgcaagctggacgcgcacgatgggctggaccgagtaccagcaggtacgctacgccaccgcacgcagtgtcttcaaatgggatggcaccgataccgtcaaagtcggcagcgatgaaaccccggttcgcgtgctggacgaagaagtctccaccgaccaggcgcgctggcataaccgctattggatcgacagcgaagggcaaattcgccagagcgaacagtatctcggcgcggattattttccggtgaaaaccactctcatcaaggcggcaaaacaatgattaaacaaactattgtcgcgttgcttttgagtgtgggagcgagtagcgtcttcgcggcaggaaccgtcaaggtgttcagcaatggcagcagtgaggccaaaacgctaacgggcgcagagcatttaatcgatctggtaggccaaccgcggctggcaaacagctggtggcccggtgcggtgattagcgaagagctggcaacggcggcagcattgcgtcagcagcaggcgttgctgacacggctggcagaacagggcgcagattccagcgccgacgatgccgctgcgattaacgccttacgccagcaaattcaggcgttgaaagtgacgggcaggcaaaaaatcaatcttgatcccgatatcgtccgcgttgccgaacgcggtaacccgccgttgcagggcaactacacgctgtgggtcggaccaccgccgtccacggtcacgttgttcgggcttatcagccgtcctggcaagcagccattcactccaggtcgcgacgtggcgagctatctctctgaccagagcctgctcagcggtgcggatcgcagctacgcgtgggtggtttacccggacggacgcacgcaaaaagcgccggtggcttactggaacaagcgtcacgtagagccgatgcccggcagcattatttatgttggcctcgcggactccgtctggagtgagacgcctgatgcccttaacgccgacattcttcagactctgacgcagcggatacctcaataatgaaaaaaagacatctgcttagcttactggcgctgggcattagcacagcttgctacggcgaaacatatcctgcgcccattggtccgagccagagcgatttcggtggcgtaggattattacaaacgcccaccgcgcgtatggcacgggaaggggagttgagtctgaactatcgcgataacgatcagtaccgttattacagtgctagtgtgcaactcttcccgtggctggaaacaacgctgcgctacaccgacgtgcgcacccggcagtacagcagcgtcgaagcgttctctggcgatcaaacgtataaagataaagccttcgatctcaaactgcgtttgtgggaagagagttactggctgccgcaagtggcggttggtgcgcgggatatcggcggtacggggctgtttgatgcggaatatcttgttgccagcaaagcctgggggccgttcgattttacgctcggcctgggctgggggtatttgggcaccagcggtaatgtgaaaaatccgctctgtagtgccagtgataaatattgctatcgcgataacagctacaaacaggcgggatctatcgacggtagccagatgttccacggtcctgccagtctgtttggcggcgtggaataccagacgccctggcaaccgctgcgcctgaaactggagtatgaaggcaataattatcagcaggattttgccgggaagctggagcaaaaaagtaagtttaacgtcggtgcgatttatcgcgttaccgattgggccgacgttaaccttagctatgaacgtggcaacacctttatgtttggcgttacgttgcgcaccaactttaacgatctgcgcccgtcttacaacgataacgcccgcccgcaatatcaaccgcagccgcaggatgccattttgcagcatagcgtggtggcgaatcagttaacgctgttgaaatacaatgccggacttgccgatccacagatccaggcgaaaggcgatacgctgtatgttaccggcgagcaggtgaaatatcgtgatagccgcgaagggatcatccgtgcgaatcggatcgtgatgaacgatctgccggatgggatcaaaacgatccgcattacggaaaatcgccttaacatgccgcaggtgacgacggaaaccgatgtcgccagcctgaaaaatcatctcgccggagagccgttgggccacgaaacgacgctggcgcaaaaacgcgtcgagccagtggttccgcagtccaccgagcagggctggtatatcgacaaaagtcgctttgatttccatatcgatccggtgctgaaccagagcgtcggtggcccggaaaacttttacatgtatcagctgggcgtgatgggaacggcagatttgtggctgacggaccatctgctgaccaccggcagcctgtttgcaaatcttgccaacaactacgacaagtttaactacactaatcctccgcaggacagccacttaccgcgcgtgcgtacccatgtgcgcgagtatgtgcagaacgatgtctatgtgaataacctgcaagccaactacttccagcatctgggcaacggcttctacggtcaggtctacggtggttatctcgaaaccatgtttggcggtgcgggggcagaagtgttgtatcgcccgctggacagcaactgggcgtttggtctggatgccaactacgttaaacagcgcgactggcgtagtgcaaaagatatgatgaaattcaccgactacagcgtgaaaaccggacatctgaccgcctactggacgccatctttcgctcaggatgtgttagttaaagccagcgtcgggcagtatctggcaggggataaaggcggcacgctggagatcgccaaacgctttgatagcggcgtggtggtgggtggctatgccacgatcactaatgttagcaaagaggagtacggcgaaggggacttcaccaaaggcgtgtatgtcagcgtaccgttggatctcttcagctctggcccgacacgcagccgtgcggcgattggctggacgccgctgacgcgtgacggtggtcagcaacttgggcgtaagttccagttgtatgacatgaccagcgaccgtagcgtcaatttccgctaagtcatgggaaaggtgccagttttcgcactcactggcaccttcattcttaatggcctgtcgagccatcaggaacgcagttcactcccggtttgcgatctggtgtgtaaaggcgaaaacattctgtcttcctgtccgtcgatatcggttgcaggtctggttgcctgagcgactgggccatcattgggctggagacattgctttgcggtaggtcggctttatcagcagtaccgagcggaccagcataagcaggaagaacagagactgataacatcaaagcagcaaaataaggcttcatttttaccacctttatcaggttacgtttcatttgttccagaggaacattgtcgatttttcgcgcattgctggtggctgggaatcacctgaatgggtgatttttgaattaccggctttggtgcggtttgtcttgccggatgcgccgccaggcgcggcttatccggcctacgggtaggtatatccggctttggtggaggcgcgctccaaatccaggttgaacaaaacatacacaaaaaatatagatctccgtcacatttttgcgttatacaggaagctcgccactgtgaaggaggtactgctatgacgagtctctctcgtccgcgcgtggagtttatctccaccattttgcagaccgtactcaatcttggcctgctgtgcctcggcctgattttggttgtcttcctcggcaaagaaacggtgcatctggctgatgtgctgttcgcgccagaacaaaccagcaaatatgagctggtagaaggactggtggtttactttctctatttcgaatttatcgcgctgattgtgaagtactttcagtccggttttcacttcccgctacgttactttgtctatattgggatcaccgccattgtgcgcttgatcatcgtcgatcataaaagcccactggatgtgttgatctacagcgctgcgatcctgttactggtgatcaccctgtggctgtgtaatagcaaacggctgaagcgggagtaaaaagtcagcacgccgaaatggcgcggcgtgctggacaggaagattacagcgtagcagtttgttgtgttttcttcgtttccggttcccagagcgcttccagctcctcaagggttttacctttggtttccgggacaaatttccacataaacagtgctgccagaacgcccatacaaccgtaaatccagtaggagaaaccgttgtggaaatgggccaccagccaggagtttttgtccatcatcgggaaggtccaggagacgaagtagttcgccagccactgggccgccaccgcgattgccagcgctttaccacgaatagcattcgggaagatttcgctcagcagtacccagcataccggaccccaggacatggcaaaggcggcaacatagaacagcatgctcagtagcgccacaatacccggtgcctgagtgtaaaacgcggtaccgaggctaaacataccgattgccattccgagtgcgccgataatttgcagtggcttacgaccaaatttatccaccgtcataattgccagaacggtgaaggtgaggttgataactccgacaataatggtctgcaacagcgcgatatccgtgctggcccccagcgttttgaacacttccggcgcgtagtacagcaccacattgatgccgacaaattgctggaagatggagagcattacgccgattacaatcacgcccacgccaaacatcagcagacgaccaccggttttgcggccatgatccagggagtgtttaatttcctgtactgcctgagttgcaagcgtgttgcccataattttgcgcaggataccttccgcctgttcttgcttgccgcggctcatcagccagcgaggactttctggcacggtatacagcagcattaagaacagcagtgcagggatacattcgctggcaaacatataacgccagccgtcagtattcagccagctggcatcaccggaacgggcaataaaatagtttacgcagtaaactaaaagttgcccgaaaataatcgcaaactggttaaaagagaccagtttcccgcgaatatgagctggagccagttccgcaatatacattgggctgagcatactggctaaaccaacgccaataccgccaataatgcgataaataacaaattccgggacataacctgccagataaacaggcacagtgttgtccgggtttatagaggtaaaaccaagttctggccaggcagaacctacaccagaaataaaaaacaggacagcagcaatcttaagactatcacgacgaccgaagcggttactgcaataaccaccgagggcaccgccgatgatgcaaccaatcagagcgctggccacgcaaaaccctaacagggagttggcagcggattcacttaagttttgtggagcaacaaagacggtattgagactctcaacagtaccggaaataacggcggtgtcgtagccaaataataaaccacctaatgtagcgactaaggtaatgctaaatatataactggaattatactgggtattcattcagacctgccttagaccattctgatcttttatcagtgcattgatgttggaattgtcaggcagttaaggcaattatcattttttacaatgcgtttacgtaatgtcttttctgtgatcttaattgtgataattatccaaaattgataaaaacaatactattgccgtgactcagagcacgaaagagaattatcgtaagtgggaaaacaaataacgtaaaaataataagctctatgatggaaatattaaccggcgaacgattcagattgcagacgaaagaaaaaaaggcgctccgtggagcgccgaataacagtcacaagttgggataacgtaagttgagggtgcagcggcataacattggcagaacaacatctttaacctttcacaccacctgccgtcaggccgttgaccagccagcgttgagccagcaagaagacgatggtgatcggtaatgcagacatcacggcagcggcggcaaagtcaccccacaggtagttttgcgggttgaggtattgctgcatccccacggccagggtgtagctgtttacgtcacgcagtaacaggctcgcgaccggaacttcagtaatggcagcgataaagctcaggatgaataccaccgccagaatcggtacactcagcggcaacaggacaaggcggaaggcctgccacggtgtcgcaccatccagcgcagcagcttcttccaggctactgtcgatggtttcgaaatagcctttgatggtccagacatgcagcgcaatcccacccagatacgcgaaaattacgccgccgtgagtattcaggccaatgaatggaatgtactcacccagacgatcaaacaacgcatacaacgcgaccagactaagtactgccgggaacatctggaaaatcagcattcctttcagcagcgtcgctttgcctggaaagcgcatacgggcgaaagcgtaggcgcaggtggtggagagcgccacaatgccaatcgcggaaatcccggcgacctttacgctgttccacagccacagcagtaccgggaatggcggtggcgtaatgcgaccatcagcctgttcaacgctaaaacctaacgccagtttccagtgatcccaggagatttgctccgggatcaggctgccggtcgcaaagtttccctgacgcaggctgatagcgacgaccatcagcagcgggaacataatcgctgcgataaaaagtagcagtagcaggtgagtaataaataaacgagctttttggcttttcggttggaccattgccatttttgttatctcccttaatcaaacttcattcgcgtggctttcaggttcactatcgccagcgcacccaccagcaggaagatcagcgtggcaattgctgccgccagaccgaagtcctgacccccgccgccttcaaaagcgatgcggtaggtgtagttaacaagcaggtcggtataaccggctggcgtggtcgtgccaagacgatccgggccgccgttggttaacagttgaatcagcacgaagttgttaaagttaaaggcgaagctggcgatcatcagcggcgtcagcggtttaatcagcagcggcagcgtaatcttaaagaagttctggaacggacctgcgccatccattgcactggcttcatacaaatcgtccggaatcgctttcagcaagcccatgcagaggatcatcatgtacggataacccagccaggtattgacgataattagcatcgtgcgggcggtggtcggatcgctgaaccaggcgggcttcacgccaaacagcgcgctcaacatcatgttgatttcaccgaagctctggttaaacaaccctttgaaaatcaagatactaatgaagcttggcaccgcgtagggcagaatcagcaggacgcgatagaccgctttgccgcgcaacgcttcccactgcaccagacacgccagaaccatgccgaccgccaccgttaaaaagacagtgatcaggctgaacaccacggtccagacgaaaatggcgaggaacggtttctgaatgccttcgtcggtaaagacgcgggtaaagtttttccagccggtggtcacggtgtaaccggggcttagcttttcatcaccccagttgccgtcggcggtaatggactggtaaaagccaatttggttattcggacgatatttcacgccgctctgattattcgtcaacgtgccgtcaccgtcgagtgtgtagagcggctgcgtgccagaaaactggcgcagggagctcatcatcactttgttgccatccggcagaatggcggtaatgtcactcagcgcctgacgattctgggtaatcacgcgcagattcgcgcgttcgccttcgggctgggcggtcgtttctttcagttgcagtttttgctcgccgccaaatttaaaagcgtcggagaggtaatttttgccggtttcgccgtcgctgagcgccagttgccactcatcgcccgccgggtaaagaccaaagttataggttttgcctgcttgccaggagcgatctaacaacacttcctgcgcacgttcaaaagtcagctggttagtgctgctgtagttggtgaaggcaatggcgatggtgcagaccagagggaagaggacgaataatcccattccagccattcccgggtaaacatagcgccaggcgtaggctttacgattggcgaaaatatacagccccgcactactcaatatcagcgtggtaatggcgaacaggtattccccttgtgcgtacattaaaacaacaaggtaacccaccagcaggccgagcagacctagcacactccatttcagcgcgtcgctttgccaccaatgtttctttttaatgacatccatggggttcttcctcattccaggacggataaggctttcacgccttatccgacaacaactgcctgatgcgacgctgacgcgtcttatcaggcctacatacgtttcggttttgtaggccggacaaggcgttcacgccgcatccggcatttcacagcattacttggtgatacgagtctgcgcgtctttcagggcttcatcgacagtctgacgaccgctggcggcgttgatcaccgcagtacgcacggcataccagaaagcggacatctgcgggatgttcggcatgatttcacctttctgggcgttttccatggtggcggcaatacgtggatctttcgccaactcttcctcgtaagacttcagcgctacggcacccagcggtttgtctttattaaccgcttccagaccttcatcagtcagcagatagttttcgaggaactctttcgccagctctttgttcggactggcggcgttaatacctgcgctcagcacgccaacgaacggtttggatggttgacccttgaaggtcggcagtaccgttacaccataattcactttgctggtgtcgatgttggaccatgcccacgggccgttgatggtcatcgctgtttcgcctttattaaaggcagcttctgcgatggagtaatcggtgtctgcattcatgtgtttgtttttaatcaggtcaaccaggaaggtcagacccgctttcgcgccagcgttatccacgcccacgtctttaatgtcgtacttgccgttttcatacttgaacgcataacccccgtcagcagcaatcagcggccaggtgaagtacggttcttgcaggttgaacatcagcgcgctcttacctttcgctttcagttctttatccagcgccgggatctcttcccaggtttttggcgggttcggcagcagatctttgttataaatcaggcttaacgcttcaacagcgatcgggtaagcaatcagcttgccgttgtaacgtacggcatcccaggtaaacggatacagcttgtcctggaacgctttgtccggggtgatttcagccaacaggccagattgagcgtagccaccaaagcggtcgtgtgcccagaagataatgtcagggccatcgccagttgccgcaacctgtgggaatttctcttccagtttatccggatgctcaacggtgactttaattccggtatctttctcgaatttcttaccgacttcagcgagaccgttatagcctttatcgccgttaatccagattaccagtttaccttcttcgattttggcgagagcgctggcggaaaacatcatcgtcgttaatgcggataatgcgaggatgcgtgcacctgtttttattttcataatctatggtccttgttggtgaagtgctcgtgaaaacacctaaacggactctagtttctttatacggcaacctctttccatcctccttgcccctacgccccaccgtcgctttgtgtgatctctgttacagaattggcggtaatgtggagatgcgcacataaaatcgccacgatttttgcaagcaacatcacgaaattccttacatgacctcggtttagttcacagaagccgtgttctcatcctcccgcctcctcccccataaaaaagccagggggtggaggatttaagccatctcctgatgacgcatagtcagcccatcatgaatgttgctgtcgatgacaggttgttacaaagggagaagggcatggcgagcgtacagctgcaaaatgtaacgaaagcctggggcgaggtcgtggtaagcaaagatatcaatctcgatatccatgaaggtgaattcgtggtgtttgtcggaccgtctggctgcggtaaaagcactttactgcgcatgattgccgggcttgagacgatcaccagcggcgacctgttcatcggtgagaaacggatgaatgacactccgccagcagaacgcggcgttggtatggtgtttcagtcttacgcgctctatccccacctgagtgtagcagaaaacatgagttttggcctgaaactggctggcgcaaaaaaagaggtgattaaccaacgcgttaaccaggtggcggaagtgctacaactggcgcatttgctggatcgcaaaccgaaagcgctctccggtggtcagcgtcagcgtgtggcgattggccgtacgctggtggccgagccaagcgtatttttgctcgatgaaccgctctccaacctcgatgctgcactgcgtgtgcaaatgcgtatcgaaatctcccgtctgcataaacgcctgggccgcacaatgatttacgtcacccacgatcaggtcgaagcgatgacgctggccgacaaaatcgtggtgctggacgccggtcgcgtggcgcaggttgggaaaccgctggagctgtaccactatccggcagaccgttttgtcgccggatttatcggtagcccaaagatgaacttcctgccggtaaaagtgaccgccaccgcaatcgatcaagtgcaggtggagctgccgatgccaaatcgtcagcaagtctggctgccagttgaaagccgtgatgtccaggttggagccaatatgagcctgggtattcgcccggaacatctactgccgagtgatatcgctgacgtcatccttgagggtgaagttcaggtcgtcgagcaactcggcaacgaaactcaaatccatatccagatcccttccattcgtcaaaacctggtgtaccgccagaacgacgtggtgttggtagaagaaggtgccacattcgctatcggcctgccgccagagcgttgccatctgttccgtgaggatggcactgcatgtcgtcgactgcataaggagccgggcgtttaagcaccccacaaaacacacaaagcctgtcacaggtgatgtgaaaaaagaaaagcaatgactcaggagatagaatgatgattactctgcgcaaacttcctctggcggttgccgtcgcagcgggcgtaatgtctgctcaggcaatggctgttgatttccacggctatgcacgttccggtattggttggacaggtagcggcggtgaacaacagtgtttccagactaccggtgctcaaagtaaataccgtcttggcaacgaatgtgaaacttatgctgaattaaaattgggtcaggaagtgtggaaagagggcgataagagcttctatttcgacactaacgtggcctattccgtcgcacaacagaatgactgggaagctaccgatccggccttccgtgaagcaaacgtgcagggtaaaaacctgatcgaatggctgccaggctccaccatctgggcaggtaagcgcttctaccaacgtcatgacgttcatatgatcgacttctactactgggatatttctggtcctggtgccggtctggaaaacatcgatgttggcttcggtaaactctctctggcagcaacccgctcctctgaagctggtggttcttcctctttcgccagcaacaatatttatgactataccaacgaaaccgcgaacgacgttttcgatgtgcgtttagcgcagatggaaatcaacccgggcggcacattagaactgggtgtcgactacggtcgtgccaacttgcgtgataactatcgtctggttgatggcgcaagcaaagacggctggttattcactgctgaacatactcagagtgtcctgaagggctttaacaagtttgttgttcagtacgctactgacagcatgaccagccagggtaaagggctgagccagggttctggcgttgcatttgataacgaaaaatttgcctacaatatcaacaacaacggtcacatgctgcgtatcctcgaccacggtgcgatctccatgggcgacaactgggacatgatgtacgtgggtatgtaccaggatatcaactgggataacgacaacggcaccaagtggtggaccgtcggtattcgcccgatgtacaagtggacgccaatcatgagcaccgtgatggaaatcggctacgacaacgtcgaatcccagcgcaccggcgacaagaacaatcagtacaaaattaccctcgcacaacaatggcaggctggcgacagcatctggagtcgcccggctattcgtgtcttcgcaacctacgccaagtgggatgagaaatggggttacgactacaccggtaacgctgataacaacgcgaacttcggcaaagccgttcctgctgatttcaacggcggcagcttcggtcgtggcgacagcgacgagtggaccttcggtgcccagatggaaatctggtggtaatagcaaaacctgggccggataaggcgtttacgccgcattcggcaaccaacgcctgatgcgacgcttgcgcgtcttatcaggcctacaacggctgtcaaatgtaggccggataaggcgtttacgccgcatccggcataaaaacaggttgtcattatctgaaaggggcgaaagcccctctgattatcgggtttagcgcgctattgcctggctaccgctgagctccagattttgaggtgaaaacaatgaaaatgaataaaagtctcatcgtcctctgtttaagtgcagggttactggcaagcgcgcctggaattagccttgccgatgttaactacgtaccgcaaaacaccagcgacgcgccagccattccatctgctgcgctgcaacaactcacctggacaccggtcgatcaatctaaaacccagaccacccaactggcgaccggcggccaacaactgaacgttcccggcatcagtggtccggttgctgcgtacagcgtcccggcaaacattggcgaactgaccctgacgctgaccagcgaagtgaacaaacaaaccagcgtttttgcgccgaacgtgctgattcttgatcagaacatgaccccaagtgccttcttccccagcagttatttcacctaccaggaaccaggcgtgatgagtgcagatcggctggaaggcgttatgcgcctgacaccggcgttggggcagcaaaaactttatgttctggtctttaccacggaaaaagatctccagcagacgacccaactgctcgacccggctaaagcctatgccaagggcgtcggtaacagcatcccggatatccccgatccggttgctcgtcataccaccgatggcttactgaaactgaaagtgaaaacgaactccagctccagcgtgttggtaggacctttatttggttcttccgctccagctccggttacggtaggtaacacggcggcaccagctgtggctgcacccgctccggcaccggtgaagaaaagcgagccgatgctcaacgacacggaaagttattttaataccgcgatcaaaaacgctgtcgcgaaaggtgatgttgataaggcgttaaaactgcttgatgaagctgaacgcctgggaagcacatctgcccgttccacctttatcagcagtgtaaaaggcaaggggtaattacgccccacagtgctgattttgcaacaactggtgcgtctcctggcgcacctttttttatgcttccttcctgggatatgagcgattttttatagtaactcacttcttcttcactaagaatatccattatctcaatgccttatcagagattcttttcctttcgccggtagtgtctggacattcaggctacttttccaggttattttatttctgttatgcagaggttttatgataagtcatatcctaaattctggcggcaataactctttgatgaaacatgatgtggtgcaaggaaataatatagtagatcttgatttactacgtaatttaaatggggtgccaggtttaaacagagataactttatttatatcagcaatattttttcaaatataaaacaacggaacgaaaaaatcatgcaataaatatgtttcgtgaagtctcaatcagtaatgatactataagtgtaaaattctacagaaatgaaaaaaattgaatgcgcttgcaattttctgatggataaagatgcgcaggggtatatcgacctgtctgatttggatttaacaagttgtcattttaaaggtgacgttataagcaaggtgtcttttttaagtagtaatctacaacatgtaacattcgaatgtaaagaaattggggattgcaattttactactgcaatagttgataatgtcatatttagatgtcgacgtttacacaatgtgatttttatcaaagcgagtggtgaatgtgtcgatttcagcaaaaatattcttgatacagttgacttcagccagagtcaacttggtcatagtaattttcgcgaatgtcagattagaaatagtaacttcgataattgttatctttacgctagccacttcaccagagcagagtttctgtctgccaaagaaataagttttattaaaagcaatttgacagctgttatgtttgattatgtgcgaatgagcacagggaattttaaagattgcattacagaacaattggaattaactattgattatagtgatatattttggaatgaagatctcgatggttatatcaataacattataaaaatgattgatacattgccagataatgcaatgatattgaaatccgttctggccgtaaaactggtgatgcaattaaaaatacttaatattgttaataaaaactttattgagaatatgaagaaaatatttagccattgtccttatataaaagatcccattatacgcagttatatccattctgatgaagataacaagttcgatgattttatgcgtcaacatcgattcagtgaggtgaatttcgatacccaacagatgatcgattttattaacagatttaatacgaataaatggctaattgataaaaataacaatttttttatccaacttatcgatcaggccttacgaagtacggatgatatgatcaaagcaaatgtttggcatctttataaagagtggattcgtagtgatgatgttagtcctatatttatagaaactgaagataatttaagaacctttaacacgaatgaattaacacgaaacgataatatctttatcctgttctccagtgtcgatgatgggccagttatggtggtaagctcccagcgcttacatgatatgttgaatcctacaaaagataccaattggaattccacgtatatctacaaatccagacatgagatgttgcctgttaatcttactcaggaaacacttttcagctccaaatctcatggtaaatatgcgcttttccccatttttactgcgagttggcgagctcatcgtataatgaataagggtgtttaagtaaaggaaaacatcaccgttcctggcatcctggacggtgatgcccctacggttgccctcgccagcacgggcatcggtaaagcgtaaggttcaacatcgttttaccacttcatgcgattgttgcgtttttgttgcgtattagatcacttaatttgctttacatctcccgtaaacacttttctgcgatacaatgcctttacgttatgtaacggagagttcggcatgagtcaccccgcgttaacgcaactgcgtgcgctgcgctattgtaaagagatccctgccctggatccgcaactgctcgactggctgttgctggaggattccatgacaaaacgttttgaacagcagggaaaaacggtaagcgtgacgatgatccgcgaagggtttgtcgagcagaatgaaatccccgaagaactgccgctgctgccgaaagagtctcgttactggttacgtgaaattttgttatgtgccgatggtgaaccgtggcttgccggtcgtaccgtcgttcctgtgagtacgttaagcgggccggagctggcgttacaaaaattgggtaaaacgccgttaggacgctatctgttcacaagtagcacattaacccgggactttattgagataggccgtgatgccgggctgtgggggcgacgttcccgcctgcgattaagcggtaaaccgctgttgctaacagaactgtttttaccggcgagtccgttgtactaagaggaaaaaaatatggagtggagtctgacgcagaataagctgctggcgtttcatcgcttaatgcgtacggataagccaattggcgcgttactgctgctctggccaacattatgggcgttgtgggtggcgacaccgggcgttccccagctctggatcctggcggtgtttgtcgcgggtgtctggctgatgcgcgctgccggatgtgtggtgaatgattatgctgaccgcaagtttgatggtcatgttaagcgcacggcgaaccgaccacttcccagcggcgcggtaacagagaaagaggcgcgcgcgctgtttgtcgtgctggtactgattagctttttactggtgctgacgctgaatacgatgaccattctgttgagcattgccgcgctagcgctggcgtgggtgtacccgtttatgaagcggtatacccatctaccgcaagtggtgctgggcgcggcgtttggctggagcattccaatggcttttgccgctgtgagtgagagcgtgccattgagttgctggttaatgttcctcgccaatattctctgggcggtggcttacgacacgcagtatgcgatggttgaccgcgatgatgatgtgaagattggcattaaatccacggcaatcctgttcggccaatacgataaattgattattggtattttgcagattggcgtactggcactgatggcgatcatcggtgagttaaatggcttaggctggggatattactggagtattctggtggctggcgcgctgtttgtttatcaacaaaaactgattgccaaccgcgagcgtgaagcctgctttaaagcatttatgaataataactatgttggtctggtactatttttagggctggcaatgagttactggcatttctgatgatgtaaaaaagccggatgatcatccggctttcttctgggttgcctgatgcgcggcgcttctcaggcctacacaacacatcgcaatttattgaatttgcagattatggaaggccggataaggcgttttcgccgcatccggcaattctctctgattacccttcgccctgcgtcgcactctcaatcgtcaaacgcacgtcacttgtaatcaactccgccagcaactgataaaccttcatcgtttctgccggttcggcatcgccgctatcgctgatatacccttcatcacgcagtgtcagcaccagagaactgaacaccgccttgtcgaagaactccggcgcgttgatgccgtgcagcacggagagacgttgcgcgacggtgcggctctctttctccagcgtaccgcggttgatgctcgggttggcactcaacaaccagaaggtgatggcataacgttgcagcgtttcgcgcgcgcctgcggccagcagctgtagcgtgcgagaatgcgccgggttgatatgcaactcatcatcttgcagggtaatcagcccctgacgttgcatctcatttgccagcgcatcaataacgtccggcaactcgtcgcgatcccagcgcaggaacagctccgctttcagcattgggtaaagcacattgacgtgctccatcaatacgtcgcgggagatgtggcgatgctgggtgacgattgccgccatcaggctaggcagcaccaacatatgcgcaatgttgttgcgatagtaggtcatcagcaccgcttgctcgcgcggcagaatgatgatgtcgccgattgtgtctttctcgacttcaaacttgttcatttgcagcgcgtgatcgataagctcgctggcgctggcactaggaacggtagagtccgtggagtagggcacgttgcgcatcagatccaggtagcagttgagttgctcggttaactgctcgcgggtgagactgcgctgacgacttgccagtagcgcagtacagcacaggttcatggcgtttgccgcgcctgcgttgttaatgcgtaccatcagatcggcagcaatattattgaccgtcggcgttaaccatgccggacgcaccgcttcgatgggatcgatagattcacgccagtcaggtacatgctggttaaggtaggtcatcaacggcattggttcaccgaagttgacgtaaccctgaccgagattacgcagcttgcttaaaccgcgcagcatctgcggcaggctctctttctctttcgtcgcgccgcgcagttctttggcgtaagtacccacttccatgacgtgctcataaccgatatagatcggaatcagcgtaatcggacgcgtgccgccacgcagcatcgcctgaatggtcatgctcagcgtaccagttttcggatccagcaaacgccccgtacgggaacgaccgccttccacgaagtactcgacggaataaccacggctgaacagttcgccgagatactcccggaaaacggtggaataaagtttattgcctttaaacgtacggcgaataaagaacgcccccagacggcggaaaatcggcccggcaggccagaaattcaggttgatcccggcggcgatatgcggcggcaccagcccctggtgatacagcacgtaagaaagcagcaggtagtccatgtgactgcggtggcaaggcacatataccagctcatgaccgtcgtgggccagctggcgaacgcgctcagcgttatggacgttgatgccctggtaaagtcggttccaggtgaagcccagaatacggtcagtcaggcgaatcatctcgtaagagaaattcgccgcaatctcttccatcagtgcaatcgcgttctgctgcgctttttcatgggagatttttttgctgcgcgcttcatcttctaccgctttggcaatggcgcgggaggcgagcagcttattaaacagatcctgacgagcaggcaaacgtgggcctacggcagccagacgttgacgggcaaagtgcatacgcgccacgcgcgccagtttctgagcgatagttttatccgtgccgtgttcatccgccatacggcgcaggctaacactcgggctgaaacgcacaaaactgtcgcgaccgagccacagtacagcgaaaaatttctgtacgccgttaagcatacgcagcggcgggttcacttcgcctttttcacgccccggcgcgcgaccaaacatcacgctcactggcaccatctgcacatccagatttgggttgctacggtgcaaatcgagatagtcgtggaacagcttaatagactcttctttcggcgtgtaataggtgaacacacgcggcccgccgtgaatgaacacatagcgcggcagtagcgtgccgtcgatttccagcggctctaacgggtcaggcaagtcatgtgccagacactgggcgcgcaacgtcagcaaatctgctttgctgttgtacggtaaaacgtacataattggacgagaggtatccagccccagttccggggcaggatctgccggaatagacttgctttttaccaggatgcttaatggtaaattcagtaatttgtagtaaattcgtggccagccggacataaacgatgtaaagcctctggttaataatgcaaatgcgcggcaaggatagcagaaagtcatgggaaattctgtggtatccgctcatgtttcgcgcggcgctacgcaaacccgaatcatcggatttaacggtacactgatattgacgctcataatgtaaaaaggttctttcaatggccaataataccactggattcacccgaattatcaaagctgctggctattcctggaaaggtttacgcgctgcatggatcaacgaagcggcattccgtcaggaaggcgtagcggtattgttggcggtggtcatcgcctgctggctggatgtggacgcgattacccgcgtgctgcttatcagctccgtgatgctggtgatgattgtggaaatcctcaatagcgccatcgaagcagtggttgaccgaattggctctgaataccatgagctttccggacgcgcaaaagatatgggatccgctgcggtgctgattgccattatcgtcgccgtgattacctggtgcattctgttatggagccattttggataacccttccagaattcgataaatctctggtttattgtgcagtttatggttccaaaatcgccttttgctgtatatactcacagcataactgtatatacacccagggggcggaatgaaagcgttaacggccaggcaacaagaggtgtttgatctcatccgtgatcacatcagccagacaggtatgccgccgacgcgtgcggaaatcgcgcagcgtttggggttccgttccccaaacgcggctgaagaacatctgaaggcgctggcacgcaaaggcgttattgaaattgtttccggcgcaagtcgcgggattcgtctgttgcaggaagaggaagaagggttgccgctggtaggtcgtgtggctgccggtgaaccacttctggcgcaacagcatattgaaggtcattatcaggtcgatccttccttattcaagccgaatgctgatttcctgctgcgcgtcagcgggatgagcatgaaagatatcggcattatggatggtgacttgctggcagtgcataaaactcaggatgtacgtaacggtcaggtcgttgtcgcacgtattgatgacgaagttaccgttaagcgcctgaaaaaacagggcaataaagtcgaactgttgccagaaaatagcgagtttaaaccaattgtcgttgaccttcgtcagcagagcttcaccattgaagggctggcggttggggttattcgcaacggcgactggctgtaacatatctctgagaccgcgatgccgcctggcgtcgcggtttgttttagttctctcttcatcaggcttgtctgcatggcattcctcactagttctgataaagcactctggcatctcgccttacccatgattttctccaatatcaccgttccgttgctgggactggtcgatacggcggtaattggtcatcttgatagcccggtttatttgggcggcgtggcggttggtgcaacggcgaccagctttctctttatgctgttgctgtttttacgcatgagcaccaccgggctgactgcgcaggcttatggtgccaaaaatcctcaggcattagcccgtacgctggtgcaaccgttgctgttggcgttgggggctggggcgttaattgcgctgctgcgtacgccgattatcgatctggcgctgcatattgttggcggtagtgaggcagtcctggaacaggcgcggcgctttcttgaaatccgctggttaagcgcaccggcgagcctggcgaatctggtattactcggttggttactcggcgtgcaatatgcccgtgcgccagtaattttgttagtggtcggcaatatcctcaacattgtgctggatgtctggctggtgatggggctgcatatgaacgtgcagggcgcggcgctggcgacggttattgcggaatatgcaacattgctgattggtctgctaatggtgcgtaaaatcctcaaactacgcggaatttccggcgaaatgctgaaaactgcctggcgaggaaacttccgtcgcttgctggcgcttaaccgcgatatcatgctgcgtagcctgttgttgcaactctgtttcggcgcgatcaccgtacttggcgcgcgactggggagtgacattatcgctgttaacgcggttctgatgacgctactcacctttaccgcctatgcgctggatggttttgcctacgcggttgaagcgcactccggtcaggcatacggtgcgcgcgacggtagccagttgctggatgtctggcgggcagcgtgccgccagagcgggatcgtagcgttactgtttagcgtggtttatttgctggctggggaacacatcattgcgttactgacgagcttaacccagattcagcagctggctgaccgctatcttatctggcaggtgattttgccggtggttggcgtctggtgttatctgctggacggcatgtttataggcgcaacgcgtgccaccgaaatgcgtaacagtatggcggtggccgccgcaggttttgcgctgacgctccttacgctgccgtggctgggtaatcatgctttgtggctggcattaaccgtctttctggcgttgcgcgggctttctctggcggctatctggcggcgtcactggcgcaatggtacctggtttgccgcaacgtgacggttaaaaattctgaataaataatcctaagccaaattgctgactacacttaatctcacgttcagaagaaaagtgaacgtactctcattcacaacctaacgatgaggtcttgattatgaataaagatgaagccggcggtaactggaaacagtttaaaggtaaagtgaaagagcaatggggcaaactgaccgatgatgatatgacgatcattgaaggtaaacgtgatcaactggtcggtaaaatccaggaacgttatggttatcagaaagatcaggcagaaaaagaggtcgtggattgggaaacccgcaatgaatatcgctggtaattaatccctcctgcccgacgtgtacaaggatgtacgccctcttaacgcggtttctttttcacctgcacagagtgatcatgctggcactgttcaggatgacgacacgcttccacttctacacatgccgcacagagcccatgtgcttcaatcacattatgccgcagggcaaaccccatttttgccgccagcgtatgcataatgtcttccacgccttctgcacactcttctttcactgcgccgcagcgatcgcaaataaacatggcactcgtatgggtgggctgatcgaacagatgacagagcacataactgttggtggattccaccttatgcacaaaaccttgctcaagcagaaaatccagcgcgcgataaaccgttggcggcttggcttgcggttcagcttcgcgcagtaaatcaagcagatcataagcgctgatagcgccatcctgcagactcatcaggcgcaacacttccaggcgctgtggggtcaggcgcacattacgctgcgcgcagattttttcagcctgcgctaataactcctgcgttgtggtcttttccatcgggcacctcaaagtgggggttaagaatgtccttactttaccatgttccaggaaaaacaccgagaacccttattgttgccgtaatgttgattttctgctttgtaggtaaggtgttatgttgccttgtcgtaccattatcaacacgataataattaataattcatttttaaataaattgcttcaagttaactcgctatttatttaactgggtttaaacgcatacctgtagttcagaaattatgagcgatttttgatagtgaccagatggcaaaagaattataaggaggacacggtacgacaaaaaaggtagatgaatcatgttgaagataatacccggtgcaactggatactttaataaaacactcaatagtaatcaattcgataatgaagatgcaatcaaagataaattagataatagaggtagtatcaaaggtaaattaaataatatatatggtaaatctattgattatgcagcgctgcgtcatcgggatataattattgcaaaaatagatttgtttattcaacgaatcacgcataatttatggcatgcacgtaaaaaaatgtgtttttaattgtgcaaataaatgatctcaaaatgtgggtcaataagtatattgacgattgcactgatgaggatttaaacgatcgtgactttattgcaagtgttgttgaccgggctatttttcatttcgcgattaatagtatatgtaatcctggggataataaagatgcaatgcccattgaacaatgtacttttgatgtagaaactaagaatgaccttccctccacggttcagctattttatgaggaatctaaggataatgaacctttagcgaatatacattttcaagcaataggttctggttttttaacgtttgttaatgcctgccaggaacatgatgacaacagcttaaaattatttgctagcctgttaattagtcttagttattctagtgcctacgcagatttaagtgaaacagtgtatattaatgaaaataatgagagctacctgaaagctcagtttgaaaaattatctcaacgtgatatgaagaagtacctgggagagatgaagcgtctggctgatgggggagaaatgaattttgatggctatctggataagatgagtcatctggtgaatgaaggaacgctcgatcctgatattttaagcaaaatgcgagatgctgcaccacaattaattagcttcgcgaagagctttgacccaaccagtaaggaagagattaaaatacttacagacacttctaaattaatttatgatttgttcggggttaaaagcgagaaataatatgtgaagttcttcgatagtatggaaggcattatataaaaggacccaatatttattgggttcttttttctctatcaatactattagcagggagatatatcaccagagtttaatgtgtgattttttatttatcgtcgaacctggattgtttatcattggccttaacaaagttaacggctaataagattatttccatcacttcgtgagagcttcatgccttgagaggatctcaattttcttttgcaatgagacaggcgcttcctgttgttatggtatagtaccccgctattgagcctcctgaatagtgatgctgaataacataaccccatgatatatcgataaaataatctctacatttgaaaatgcacggtaattctgaaatgcaaaaaatcaaccaaaccagcgcaatgcctgaaaaaactgacgttcactggagtggtcggtttagcgttgcaccaatgctcgactggacggacagacattgccgctatttcttgcgtctgctttcccgcaatacgttgctgtataccgaaatggtgaccacaggggcgattattcacggtaaaggtgattatctggcgtacagtgaagaagaacatccggtagcgttgcaactgggcggtagcgatccggcggcgctggcgcagtgtgcaaagctggcagaagcgcgcggatatgatgagatcaacctgaatgtcggctgcccgtctgaccgggtgcagaacggcatgtttggtgcgtgtctgatgggtaatgcgcagctggttgccgactgcgtgaaagcgatgcgcgatgtggtgagcattccggtgacggtgaaaacgcgtattggcatcgacgaccaggacagctatgaatttctctgcgatttcatcaataccgtttccggcaaaggcgagtgtgagatgttcatcatccacgcacgtaaagcctggcttagcgggttaagcccgaaagaaaaccgtgaaatcccgccgctcgattatccgcgtgtgtatcaactgaagcgtgactttccgcatctgacaatgagcattaacggtggtatcaagagcctggaagaggccaaagcacacctgcaacatatggatggcgtgatggtcgggcgcgaggcgtatcagaatccgggtattctggcggcggtagaccgggagatctttggttccagcgataccgatgccgatccggtggcggtagtgcgcgccatgtatccgtacattgagcgtgaactcagccaggggacgtatctcggccatattacccggcatatgttgggcttgttccagggtattcctggcgcgcggcagtggcggcgttatttaagtgaaaatgcccataaagcgggtgcagacattaatgtgctggaacacgcgctcaaactggtggcggataagcgttaacttttcaccaaaaagtagtcaaattcaccacgccctgcgcaccgtcgcggggcgttttgctgttaaatcaatagattatttttggcatgattcttgtaatgccagcaagagatttcatatttgggagagcatcatgctggaactactttttgtgattggcttttttgtcatgctgatggtcaccggcgttagcttgctgggcattatcgccgcgctggttgtggcgacggccattatgttcctcggcggtatgctggcattgatgattaagttgctgccgtggttactactggcgattgcggtggtgtgggttattaaggcgattaaagcaccaaaagtgccgaaatatcagcgttatgaccgctggcgttactaagggattgtgcggatgatcacaacctaaggttttatccttagaacaaaataggaattgataatcaaatctgtcactattgcgcctctaacagattcatcgtgctgtaccctacatacagccgaactataaaaagaaagggcttcccaggtggaagccctatttcttttatggaatcagcaggctggaaccttgcgtcgcccggctttccagaatctcatgcgcacgctgcgcatccttcagcggatatttctgctgctcggcgacatcgaccttaatcacaccgctggcaatcaaagagaacagttcattactggcctcggttaattcctcccgcgtggtgatatagccttgcagggaagggcgtgtcacatacaagctgcctttttgattgagaatgcctaagttcacaccggtaaccgcaccactactgttgccaaaactgaccattaagccgcggcgttgcaggcaatccaggctccgttcccaggtgtctctgcccacggaatcgtacaccacgcgcactttcttaccgccggtgatctcttttaaccgctcgaccagatcctcttcacgatagttaataacctgccacgcgcccgcttttagcgcgctctgcgctttttgcgcggttcctacggtgccgataagtttcgcgcccagggcttttgcccactggcaggcaattaagccaacgccgccagccgctgcgtggaacaggaactgttcatcgggtttaatttcataggttttgcgcagcagataataaaccgttaagcctttcaggaaggatgccgcagcttgctcaaaagaaattgccgcaggcagaatcgccgctttatccgcaataatgttatgcacagagctgtaagcgcctaacgcgctctgcgcatagactacacgatcgcctgccttaatatgctttacaccactgccgactttactcacgatgcctgctgcttcggtgcctaatccgctgggtaggcttggcggcgggtaaaggccgctgcggatatatgtgtcgataaaattgatgccgatggctttattttcgacctggatttcattctccgccggatcggcaggagtgaactctacggcttgaagtacttccgggccaccgtgcttgtgaaattcaattcgtgttgccatgtgtcctccagaacgtatcgtcagggtctgcttcatatgataaagtttcgacccattctttatctcggtaactccattcactatggcaggaaataaacccttcaacaaacagcaggctgaaccccgcgaacgcgatccacaagttgccgggctgaaagtgcctccgcacagcatcgaagcggagcagagcgtgttgggcggtttaatgctagataacgaacgctgggatgatgtagccgagcgtgtggtagcagacgatttttacacccgcccacaccgtcatatctttactgaaatggcgcgtttgcaggaaagcggtagccctatcgatctgattactcttgcggaaagcctggaacgccaggggcaactcgatagcgtcggtggttttgcttatctggcagagctgagtaaaaatacgccaagtgcggctaacatcagtgcctatgcggacatcgtgcgtgaacgtgccgttgtccgtgagatgatcagcgttgcgaatgagattgccgaagctggttttgatccgcaggggcgtaccagcgaagatctgctggatctggctgaatcccgcgtctttaaaattgccgaaagtcgtgcgaacaaagacgaagggccgaagaacatcgccgatgtgctcgacacaaccgtggcgcgtattgagcagttgtttcagcagccacacgatggcgttaccggggtaaacaccggttatgacgatctcaacaaaaaaaccgctggcttgcagccgagcgatttgatcatcgtcgccgcgcgtccgagcatgggtaaaacaacatttgcgatgaacctcgtcgaaaacgcggcgatgttgcaggataaaccggtacttatcttcagcctggagatgccaagtgaacagatcatgatgcgttctctggcgagcctgagccgcgttgaccagactaaaatccgtaccgggcagctcgatgacgaagactgggcgcgcatttccggcaccatgggtattttgctcgaaaaacgcaatatctatatcgatgactcctccggcctgacgccaacggaagtgcgttcccgcgcacgccgtattgcccgtgaacacggcggcatcgggcttatcatgatcgactacctgcaactgatgcgcgtaccggcgctttccgataaccgtacgctggaaattgcagaaatctctcgcagcctgaaagcactggcgaaagaactgaacgtgccggtggtggcgctgtcccagttgaaccgttctctggaacaacgtgccgacaaacgcccggtcaactccgacctgcgtgaatctggctctatcgagcaggatgcggacttgatcatgtttatctatcgtgatgaggtgtatcacgaaaacagtgatttaaaaggcatcgcggaaattattatcggtaaacaacgtaacggcccaatcgggacggtacgcctgacctttaacggtcaatggagccgcttcgacaactatgcggggccgcagtacgacgacgaataataattattttatgaattaggtaattaaagcaaacacttatcaaggaacacaaatgcaagcggcaactgttgtgattaaccgccgcgctctgcgacacaacctgcaacgtcttcgtgaactggcccctgccagtaaaatggttgcggtggtgaaagcgaacgcttatggtcacggtcttcttgagaccgcgcgaacgctccccgatgctgacgcctttggcgtagcccgtctcgaagaagctctgcgactgcgtgcggggggaatcaccaaacctgtactgttactcgaaggcttttttgatgccagagatctgccgacgatttctgcgcaacattttcataccgccgtgcataacgaagaacagctggctgcgctggaagaggctagcctggacgagccggttaccgtctggatgaaactcgataccggtatgcaccgtctgggcgtaaggccggaacaggctgaggcgttttatcatcgcctgacccagtgcaaaaacgttcgtcagccggtgaatatcgtcagccattttgcgcgcgcggatgaaccaaaatgtggcgcaaccgagaaacaactcgctatctttaataccttttgcgaaggcaaacctggtcaacgttccattgccgcgagcggtggcattctgctgtggccacagagccattttgactgggtgcgcccgggcatcattctttatggcgtcagcccgctggaagatcgctccaccggtgccgattttggctgtcagccagtgatgagtctaacctccagcctgattgccgtgcgtgagcataaagccggagagcctgttggttatggtggaacctgggtaagcgaacgtgatacccgtcttggcgtagtcgcgatgggctatggcgatggttatccgcgcgccgcgccgtccggtacgccagtgctggtgaacggtcgcgaagtaccgattgtcgggcgcgtggcgatggatatgatctgcgtagacttaggtccacaggcgcaggacaaagccggggatccggtcattttatggggcgaaggtttgcccgtagaacgtatcgctgaaatgacgaaagtaagcgcttacgaacttattacgcgcctgactagtagggtcgcgatgaaatacgtggattaatcgttctgtaatatttgattgtctgtgccggatgcggcgtgaatgccttatccggccaataaaatcctaaaaattcaataagttgatgttctttcatgctcttataaaggtcgtgcctctggcggatgtacgtttgtcatgagtctcactctgttgctaattgccgttcgctcctgaacatccactcgatcttcgccttcttccggtttattgtgttttaaccacctgcccgtaaacctggagaaccatcgcgtgtttcaaaaagttgacgcctacgctggcgacccgattcttacgcttatggagcgttttaaagaagaccctcgcagcgacaaagtgaatttaagtatcggtctgtactacaacgaagacggaattattccacaactgcaagccgtggcggaggcggaagcgcgcctgaatgcgcagcctcatggcgctagcctttatttaccgatggaagggcttaactgctatcgccatgccattgcgccgctgctgtttggtgcggaccatccggtactgaaacaacagcgcgtagcaaccattcaaacccttggcggctccggggcattgaaagtgggcgcggatttcctgaaacgctacttcccggaaagtggcgtctgggtcagcgatcctacctgggaaaaccacgtagcaatattcgccggggctggattcgaagtgagtacttacccctggtatgacgaagcgactaacggcgtgcgctttaatgacctgttggcgacgctgaaaacattacctgcccgcagtattgtgttgctgcatccatgttgccacaacccaacgggtgccgatctcactaatgatcagtgggatgcggtgattgaaattctcaaagcccgcgagcttattccattcctcgatattgcctatcaaggatttggtgccggtatggaagaggatgcctacgctattcgcgccattgccagcgctggattacccgctctggtgagcaatagcttcagcaaaattttctccctttacggcgagcgcgtcggcggactttctgttatgtgtgaagatgccgaagccgctggccgcgtactggggcaattgaaagcaacagttcgccgcaactactccagcccgccgaattttggtgcgcaggtggtggctgcagtgctgaatgacgaggcattgaaagccagctggctggcggaagtagaagagatgcgtactcgcattctggcaatgcgtcaggaattggtgaaggtattaagcacagagatgccagaacgcaatttcgattatctgcttaatcagcgcggcatgttcagttataccggtttaagtgccgctcaggttgaccgactacgtgaagaatttggtgtctatctcatcgccagcggtcgcatgtgtgtcgccgggttaaatacggcaaatgtacaacgtgtggcaaaggcgtttgctgcggtgatgtaatgcaggaaagcaggctggagctacccagcctgcagtgaaattaaactgtcgtcgctttcactctttctttatagatgatttttttgatgccatcgttctacgtgagagataataaacgttgttagttcttttattgttaagcttatcccaattatctggaattccttatcctgtttttttgggtggagtaataatttctgcacatctaaccattattaaatttaataataagtatcgggtttgttacgatagaatatttctatatcctcaagaatatgctttgccttattgcctgtgactttctgagattcaattatagtatcgttaaattctaatgttaaagagaactcttttttccgctttgtgtaagtttaaccttatattgattaccaatatcaaataaaaaggtcctgtaatgagaataatcacctttaacctcctcggcaaaacagcaaagcgtgcaaatatacataaagtctttcttacccctgattttgttaactaaatcaataaatgcgtgaaaaactttacttgcaatagaacttgatacttcttctccaggtctaaaaaatcttttgcaatttttaactgtgtttctatgtataaaaagaaatctttggcataagagatatctttattatttagtgcatctagctcaacaggtaaagatgtcgttttgttgctattcacatatgatatattcatatcatcatctccatcgcgagtaataaaattaatcaccattgtagggtagggggctggtcaatcagaaatcatctttataaacttcgattgtttttgtaatgctgtatcattaagttcattaaatcgtacagcagataaatgttctatcaaatttcgctcatttgccgaggattcatcataataaacgtaaaattaatgtatccttacatcgagtaataaacattttttatacaaaaaaagacaggaacgtatttactgggttaaatataatcatcctgcttttcatcacaaaaaccgcagataatccttcctttccccggcagctggcgttatggtcagatggtttttgcaacaaatctcacaataaaaagtttcaacatactgactatttagggaaaaatatgcgcaagatcacacaggcaatcagtgccgtttgcttattgttcgctctaaacagttccgctgttgccctggccagttctcctagtccgcttaaccctgggactaacgttgccaggcttgctgaacaggcacccattcattgggttagcgtcgcacaaattgaaaatagcctcgcagggcgtccgccaatggcggtggggtttgatatcgatgacacggtacttttttccagtccgggcttctggcgcggcaaaaaaaccttcagcccagaaagcgaagattatctgaaaaatcctgtgttctgggaaaaaatgaacaatggctgggatgaattcagcattccaaaagaggtcgctcgccagctgattgatatgcatgtacgccgcggtgacgcgatcttctttgtgactggtcgtagcccgacgaaaacagaaacggttagtaaaacgctggcggataattttcatattcctgccaccaacatgaatccggtgatctttgcgggcgataaaccagggcaaaatacaaaaagccaatggctgcaggataaaaatatccgaattttttatggcgattctgataatgatattaccgccgcacgcgatgtcggcgctcgtggtatccgcattctgcgcgcctccaactctacctacaaacccttgccacaagcgggtgcgtttggtgaagaggtgatcgtcaatagtgaatactgacagagcgggagagcgtgatgctctcccgaatgctgtttttttaatcacacctttatcctttcgctgtcttgctgcaaactgattaagagagttttatcaaggagcagcacatgtggtatcaaaagacgctcacgcttagcgccaaatctcgtgggtttcatctggtaacggatgaaattctgaatcagctggctgatatgccgcgcgttaacatcggcttactgcatctgttgctgcaacatacctccgcctctctgacacttaatgagaactgcgatcccaccgtacgccacgacatggagcgttttttcctccgcaccgttcccgacaacggaaattatgagcatgactatgagggagcagacgatatgccttctcatatcaaatccagtatgctgggaacaagccttgtattgccggtgcataaagggcgtattcagaccggcacctggcaaggcatttggctgggggaacatcgcatccacggcggaagccgtcgcatcatcgcgacactacaaggggagtaaaaaatgaccattagcgagttgctacaatattgcatggcaaaaccaggcgcagaacagagcgtgcataatgactggaaagcgacgcagatcaaagtggaagatgtactgtttgcgatggtgaaagaagtagaaaatcgcccagctgttagcctgaaaaccagcccggagctggcggagctgctacgtcagcagcacagcgatgtgcgtccaagccgccatctgaataaagcgcactggagcaccgtgtatctcgacggtagcctgccagatagccaaatctattatctggtggatgcgtcttatcagcaggcggtgaatttactgccggaagaaaaacgtaaattgctggtgcaactctgaaaggaaaaggccgctcagaaagcggccttaacgattacagcatcggcttaaggaagcgtgccgtgtgacttgcttcgcactccgcgacggtttctggcgtaccggagacgaggatctcgccgccaccactgccgccttctggtcccaggtcgacaatccagtcagcggttttgatcacgtcgagattgtgctcaatcaccacaatggtgttgccctgatcgcgcagtttatgcagtacgtcgagcagttgctgaatatcggcgaagtgcagaccggtggtcggctcgtcgagaatatacagcgtctgcccggtgccgcgtttactcagttcacgcgccagcttcacgcgctgggcttcaccgccactaagggtggttgcggactgccccagtcgaatgtacgtcaggccaacgtccatcaacgtttgcagcttacgcgccagtgcaggtacggcatcaaagaactcacgcgcctcttcgatggtcatatccagcacttcgtggatggttttgcctttgtacttaatctccagcgtttcacggttatagcgtttacctttgcactggtcgcacggcacgtagatatccggcaggaagtgcatctccactttgatcacgccatcgccctgacaggcctcgcagcgtccgccacgaacgttaaagctgaaacgtcccggcgtatagccgcgcgcacgggattccggtacgcccgcaaacagttcgcgcacaggcgtaaacacgccggtataggtcgccgggttagaacgtggagtacgaccaattgggctttggtcgatatcgatcactttatcgaaatgctccagcccctgaatatcgcgatacggtgctggttcggcgatggtcgccccattcaactggcgttgggcaatcgggaacagtgtgtcgttaatcagcgtgcttttaccggaaccactaaccccggtgatgcaggtaaacagacccaccggcagcgtcagcgtcacgtccttcaggttgttgccgcgtgcgcctgtcagcttcagcactttttccggattcgccggaacgcgtttcttcggcacttcaatcttgcgtttgccgctcatgtactgcccggtcaagctctccggcaccgccataatcgcttccagcggaccttctgcgaccacttcaccgccgtgaacacctgcgcccgggccaatgtcgatcacatggtcagcggcgcgaattgcgtcttcgtcgtgctccaccacaatcacggtattaccgagatcgcgcagatggataagcgtacccaacaggcgctcgttatcacgctggtgcaggccgatagacggctcgtccagcacgtacataacgccaaccaggcccgcaccaatctggctcgccagacggatacgctgtgcttcaccgccagaaagcgtttctgcgctgcgggaaagcgtcaggtaattcaggccgacgttaacgaggaatttcagacgatcgccgatctctttaaggattttttctgcaatcttcgcccgctgacctgcgagtttgagattgttgaagaattccatcgcatgaccaatgctcatgtcggagatagcaggcagcggcgtattctcgacatacacgtggcgcgcttcccgacgcagacgcgtcccttcgcagctggcgcacggacgattactgataaacttggctaattcttcgcgtaccgcgctggattccgtctctttatagcggcgctccatattatgcagcacgccttcgaacggatgacgacgaatggaggtatcgccacgatcgttcatgtatttgaattcaatgttttctttgccagaaccgtacaacaccactttatgcacgttcgcgctcaggctgccccacggcgcttcgacgtcgaacttatagtgatctgccaggcttttcagcatctggaaataatagaagttgcggcgatcccagccacggatcgcaccaccagccaggctcagttccggattctggatcactcgatcaggatcgaaatattgctgtacgccaaggccgtcgcaggtcgggcaggcccccgccgggttgttaaagctaaacagtcgcggctccagttcacgcatactgtagccgcaaattgggcaggcgaagttggcggagaacagcagctcttccgctttcgggtcgtccatatccgccactaccgcggtaccaccggaaagctccagcgcggtttcaaaactctcggcaagacgttgggtaagatcgtcacgcaccttgaagcgatcaaccaccacttcaatggtatgtttcttttgcagttccagttttggcggatcggaaagatcgcagacttcgccatcaatacgagcacggatgtagccctggcttgccaggttctccagcgttttggtgtgttcgcctttgcgctctttaatgattggcgcgagtagcatcagacgcttgccttccggctggctcagcacgttatccaccatctggctgacggtttgcgccgccagcgggacgtcgtggtccggacagcgcggctcgccaacgcgggcgaataacaaacgcaaatagtcgtggatttcggtgattgtccccaccgtagaacgcgggttatgagacgtgcttttctgctcaatactgatggcaggagaaagcccctcaatatgatcgacgtccggcttttccatcagactcagaaactgccgcgcgtaggcggaaagggattcaacgtaacggcgctgcccttcggcatataaggtgtcgaaagcgaggctggatttgccagaaccgctaagcccggtcacgacaatgagcttgtcgcgggggataacgaggttgatgtttttgagattatgggtgcgggcgccccgaacttcgatcttatccattcacctttcccggattaaacgcttttttgcccggtggcatggtgctaccggcgatcacaaacggttaattatgacacaaattgacctgaatgaatatacagtattggaatgcattacccggagtgttgtgtaacaatgtctggccaggtttgtttcccggaaccgaggtcacaacatagtaaaagcgctattggtaatggtacaatcgcgcgtttacacttattcagaacgatttttttcaggagacacgaacatggccagcagaggcgtaaacaaggttattctcgttggtaatctgggtcaggacccggaagtacgctacatgccaaatggtggcgcagttgccaacattacgctggctacttccgaatcctggcgtgataaagcgaccggcgagatgaaagaacagactgaatggcaccgcgttgtgctgttcggcaaactggcagaagtggcgagcgaatatctgcgtaaaggttctcaggtttatatcgaaggtcagctgcgtacccgtaaatggaccgatcaatccggtcaggatcgctacaccacagaagtcgtggtgaacgttggcggcaccatgcagatgctgggtggtcgtcagggtggtggcgctccggcaggtggcaatatcggtggtggtcagccgcagggcggttggggtcagcctcagcagccgcagggtggcaatcagttcagcggcggcgcgcagtctcgcccgcagcagtccgctccggcagcgccgtctaacgagccgccgatggactttgatgatgacattccgttctgatttgtcattaaaacaataggttatattgttttaaggtggatgattaaagcatctgccagccataaaaaagaagcctccgttatggaggcttctacgtatcaggtcaaaatcattggccattgtggcggtgtctgattcatctcttctatcatcacgctctcgatgttgtgccagatagcggtgatgtccgccattgtgatgccaagcaaccccattgcgaaccaacaggcggaaacaacgcccagaccgctgctgatcaccgcaagcccgacataatcagaccgacgaaaacggatgttgagtgtgctggccagaaacatcattacggcactaagaagttgccagcgaagaagaaccacgccagtggtgagggtagccatcaaacaattcctctgaaaagagccgatgccctggacagcgcggcgttgttcacgggaggcgtggtacactctggctatcgcggggcttgcagaacacaaaaatgaaacactctgtttgtttcattaattttgtgaactatatcacaattgattgtttgttagccatattaggccgtgacttttattgctgtacagattatgtggtttttcagtggcattaagggcatatcttcccgccgcctctgcattcctgtaggaaattaattttgaatatcaatgaattattttcatccaggtgacgattagaaaggtatcaatttcaaatcaggcaaaagtgctatttataccgtaagatttatctaaagacgtcggtacccagggttttcaccttgcaatggccgggtataaacaggcaggaaattgatagcaatgagtcatcgtgcacgacaccaattactggcgttgccgggcattatctttttagttctctttcccatcattcttagcctatggattgccttcctttgggcaaaaagtgaagtgaataatcagctccgaacctttgctcaactggcactggataaatccgagctggtcattcgccaggcagatttagtgagcgatgcagctgaacgctatcaggggcaagtttgcactccagcccatcaaaagcgaatgttgaatattattcgtggctatctttatattaatgaattgatctatgcccgtgataaccattttttatgcagtagcctgatagcgcctgtaaacggctatacgattgcaccggccgattataagcgtgaacctaacgtttctatctattattaccgcgatacgccttttttctctggctataaaatgacctatatgcagcggggaaattatgtggcggttatcaaccctctcttctggagtgaagtgatgtctgatgacccgacattgcaatggggtgtgtatgatacggtgacgaaaacctttttcagcttaagcaaagaggccagcgcagcaacgttttctccgctgattcatttgaaggatttaaccgtacaaagaaatggctatttatatgcgacagtttatagcacaaaacgcccaattgcagccattgttgcgactagttatcaacgtcttataacccatttttataatcatcttatttttgcgttgcccgccggtattttggggagtcttgttctgctattactctggctacgtattcgacaaaactatttatctcccaaacgtaaattgcaacgcgccctcgaaaaacatcaactttgtctttattaccagccaataatcgatatcaaaacagaaaaatgtatcggcgctgaagcgttgttacgttggcctggtgagcaggggcaaataatgaatccggcagagtttattccgctggcagaaaaggaggggatgatagaacagataactgattatgttattgataatgtcttccgcgatctgggcgattacctggcaacacatgcagatcgctatgtttctattaacctgagcgcctccgattttcatacgagtcggttgatagcgcgaatcaatcagaaaacagagcaatacgcggtgcgtccgcagcaaattaaatttgaagtgactgagcatgcatttcttgatgttgacaaaatgacgccgattattctggctttccgccaggcaggttacgaagtggcaattgatgattttggtattggctactctaacttgcataaccttaaaagtttgaatgtcgatattttgaaaatcgacaaaagctttgttgaaacgctgaccacccacaaaaccagtcatttgattgcggaacacatcatcgagctggcgcacagcctggggttaaaaacgatcgctgaaggcgtcgaaactgaggagcaggttaactggctgcgcaaacgcggcgtgcgctattgccagggatggttctttgcgaaggcgatgccgccgcaggtgtttatgcaatggatggagcaattacccgcgcgggagttaacgcgcgggcaataaaattacaggcggtggcgataatcgctgggagtgcgatcaaactgccgacggaaaacgcgggagaaggtctgctggctgacataacccaggtccattgcgatatcaaaaatcggacgctcggtggtgcgcaactcaacggcggccagtaacaggcggcgttggcgaatgtaatcgccaagcgtctgatgcgtcaccgtgcggaacattcgttgcaagtaccacttactatagccacttttttttgcgactacatcaatgttaagcggctggtcaatatgctcgtcaatccatgcgataagatcctgaataattttctgatgggacataaatctgcctcttttcagtgttcagttcgttaattcatctgttggggagtataattcctcaagttaacttgaggtaaagcgatttatggaaaagaaattaccccgcattaaagcgctgctaacccccggcgaagtggcgaaacgcagcggtgtggcggtaagcgcgctgcatttctatgaaagtaaagggttgattaccagtatccgtaacagcggcaatcagcggcgatataaacgtgatgtgttgcgatatgttgcaattatcaaaattgctcagcgtattggcattccgctggcgaccattggtgaagcgtttggcgtgttgcccgaagggcatacgttaagtgcgaaagagtggaaacagcttagctcccaatggcgagaagagttggatcggcgcattcataccttagtggcgctgcgtgacgaactggacggatgtattggttgtggctgccttagccgcagtgattgcccgttgcgtaacccgggcgaccgcttaggagaagaaggtaccggcgcacgcttgctggaagatgaacaaaactaaagcgccacaagggcgctttagtttgttttccggtctttgtctttctctctatcccgctggtacacaggagggtttcccccgacgtcaacacacctcattcgagcacgtggtggaggttccggttggtgttgatgctttaattgtatgtcaccgacgtttcttcgccagtgtaaaagtatactttttaaccgcaatatttttgtcatctcagacgattttttatcgcaatcctgaacggtatacggctcgataacgctgcaatcttgcgcaccgacgataacgtttgcgcatcaattgcctggtttttcatcgtcaagacaataaaagagaaaaaagcagcaaacttcggttgaaaaagccgctatgatcgccggataatcgtttgctttttttaccacccgttttgtatgcgcggagctaaacgtttgcttttttgcgacgcagcaaattgtcgcaaacctggagcaggaagataacgtttcgctggcaggggattgtccgccacgcatcttgacgaaaattaaactctcaggggatgttttcttatgtctacgccaagtgcgcgtaccggcggtagtctcgacgcctggtttaaaattagtcaacgtggaagcactgtccgtcaggaagtggttgccgggttaacaacgtttctggcgatggtctacagcgtcatcgtcgttccaggtatgttgggtaaagcaggcttcccgcctgcggcagttttcgttgcaacctgtctggttgccggactcggttctatcgtgatgggtctgtgggctaatctgccgttggcgattggttgcgccatctccctgacagcgtttaccgcattcagcctggtgctggggcaacatattagcgtacctgtcgcgctgggtgccgtgttcctgatgggtgtgctgtttacggtaatttctgccacgggtatccgtagctggattttgcgcaacttgcctcacggtgtggcgcacggcacggggattggtatcggtctgttcctgctgctcattgccgctaacggtgtcggtctggtgattaaaaacccgcttgatggtctgcccgttgcgctgggtgatttcgcgaccttcccggtgattatgagtctggtaggtctggcggtgatcatcggcctggaaaaactgaaagtccctggtggcattctgctgaccattatcggtatcagtattgtcggtttgatcttcgatcctaacgtccatttctccggcgttttcgccatgcctagtttgagcgatgaaaacggcaatagtctgattggcagcctggacattatgggcgcgctgaatcctgtagtcctgccaagcgttctggcgctggtgatgacggcagtatttgatgccaccggaactatccgtgccgtcgccggccaggcgaacctgctggataaagatgggcagatcatcgacggtgggaaagcactgaccactgactccatgagcagcgttttctctggcctggtgggtgcggctccggcagcggtatacatcgagtctgcggcgggtacggcggcgggcggtaaaaccggtttgacggctatcaccgttggcgtgctgttcctcctgattctgttcctctctccgctctcttacctcgttccggggtatgcaacggctccggcgctgatgtacgttggcctgctgatgctgagcaacgtggcgaaaatcgactttgctgattttgttgatgcgatggcgggtctggttacggctgtattcatcgtgctgacctgtaacatcgtaacaggcatcatgatcggcttcgcgactctggtgattggtcgtctggtttccggcgaatggcgcaagttgaacatcggtacggtcgttatcgccgtggcgctggtgaccttctatgcgggtggctgggctatctaatctttcatcggattctgaaaacgggtggcaatggctgcccgtttttattttctccgcacattgtgtgagcttttgcgatattctgaaaaaaatgagaattcaggcataacgtctttctcagatcataaaaaacatcgcaaacagggaacgcatggaaatcttcttcaccatactgataatgaccctcgtggtcagcctgtccggggtggtcactcgtgtcatgccctttcagatcccgcttccgcttatgcaaatcgccatcggtgcgctactggcgtggccgacgtttggtttgcatgtggagtttgatcctgaactctttttagtcttgtttatcccgccgttgctgttcgctgatggctggaaaacgccgacccgtgaatttctcgaacatggtcgagagattttcggcctcgcgctggcgctggtggtggtcaccgtggtcggcattggcttccttatttactgggtggtgccgggcattccgctgatccctgcctttgcgctggcggcggtgctttctccgaccgatgctgtggcgctctccgggattgttggcgaagggcgcatcccgaaaaaaatcatgggcattttgcagggcgaagcgttgatgaatgacgcctccggtctggtgagcttgaagtttgccgtagcagtggcgatggggacgatgatcttcaccgtcggcggtgcgacggtcgaatttatgaaagtagccattggcggtattctcgccggttttgtggtgagctggctgtacggtcgcagcctgcgattcctcagccgctggggcggtgatgaacccgcgacgcagatcgtcctgctgttcctgctgccattcgcttcttatctgattgccgaacatattggcgtttccggcatcctcgctgcggttgccgccgggatgaccatcacccgctccggtgtgatgcgccgtgcgccgctggcaatgcgcctgcgtgcaaacagcacctgggcgatgctggaatttgtctttaacggcatggtgttcctgctgttaggtctgcagctgccgggtattctggagacgagcctgatggcagcagaaatcgaccctaacgtcgaaatctggatgctgtttaccaatattattctgatatatgcggcgctgatgctggtccgtttcggctggctgtggacgatgaaaaagttcagcaaccgcttcctgaagaagaagccgatggagtttggtagctggaccacacgagaaatcctgatcgcgtctttcgccggggtgcgtggggcgatcactctggccggtgtgctctctatcccgctgctcttgccggatggtaacgtcttcccggcgcgctatgagctggtgttcctggcggctggcgtcattctcttcagcctgtttgtcggcgtggtgatgttgcctattctgctacaacacattgaagtcgcggatcatagccaacaattgaaagaggaacgtattgcgcgagcggcaacggcagaagtggcgattgtggcgatccagaaaatggaggagcgtctggcggcggataccgaagagaatatcgataaccagctgcttacggaggtcagttctcgcgtcattggtaacctgcgtcgtcgcgccgatggacgtaacgacgttgaaagttccgtgcaggaagagaaccttgagcgtcgcttccgtctggcggcattgcgttctgaacgtgctgaactttaccacctgcgcgccacacgggagatcagcaacgaaacgctgcaaaaattactgcacgatctcgatttgcttgaagcgttgctaattgaggaaaatcagtaagccgaaagcgacgtaaccaggcccgaggtaatctgaaaaaggtgcaatcttttgcacctttaacaggttagctcgggctaacattcatgattctaaaacaaataaattatctctcttttaaagtcaattcattggctgttcttcgacttaacctcaatctgcatcttgcataatatctgcagtaatcttcatagcgactgcatgaagattatcctcagtttgactcatgccagtatgagtggcacaatcttcttcaaagaatttctgtagtgttaccaggatatcactattaatggagatattttcctcaccacggagaatggtaatacccattccctggacgctagcctcatcgaaattaacacgatagagacggatattaaacatccaggcttttgttaaaacagaacagttgaaatggcaattgcttaaattggcattattaaaattaacattagccatattagagtcggtacatataaccatttcgaggaacgtatttgttaaccgcgtaaaaaagagtttgctatcaattaagtttatattctggagggttgctttattcaggttgacacgagacagatcagcatgttcaaagttaattaaatcaagtttagagaagctaaggtcggctctaaataaattaatatatggcgctattactttataaagatttacctcagccatgtatgccatataaaaattactataatcaaggaaggtatttttaatattggctctattcattgttgcattgtagaattgaacatgcatagcggaacaactatttagagttccgtcagtcatttttatctgagcgaaattactgtcatcgagaatacaattatcaaaaagtattttttccattatggcgaaattaaaattcgttttatacatattacagtcctgaaaaatagcgttttgtagtctgcaacctgcaaaattgctattggataaatcttcatctttaatcacgatacctttcaggctaaggtgactaaaatcgtaaccaccatttactgtctgtgggatttcgatagtattattatggacggtgacattatttataaaatataccaccttaatactcacttccttatctttattaaggtaaactcttctcgtaattctatcgtcacatttattatttgcatgactagctatatctataaaatatttatgtattttcctgtccgtttctttcgtgatttttccacttggtaaactatcataaattcttttcattttctgaatcaagcctatcactttttcatgatcatccattttgaaaagagagagggctttattgtcaattaacgtgtttttatgatgtttgctgtaattatcactttttgttttctttgtatgacttggacttgtgacagagtggttatcgttaatcaggcaaagagggaaaaacatattatttaaaccattatagcgcataaaatatccttataattaacaagaaagaaaaggcatattctctgcattatcattttctacgactgtcaaaaatcgctcattttttaatgagtttatttgtttaatattatgggaaaaggtgatgcatttgggagaggaagagtattccccggtcagacgaccggggaaggggagagattaatgcgcgcggccttgctcaacgccaaagccggtctgggagcggataaactgcgcgcggaacagttcacgctcacgcgcgccttccgcactgttatcggttgcgctgaagaaccagatgccgaggaatgccacggtgatagagaacagcgccgggtattcatacgggaagatggctttttcgtgaccaaggatctgtacccaaatcgtcgggccgaggatcatcagtactactgcggtaatcagccccagccagccacccatcatcgcgccacgcgtggtcagtttgctccagtacatagaaagcagaatgatcgggaagttacagctcgccgcgatggcaaacgccagccccaccataaaggcgatgttctgattctcaaacagcacgccgaggataatcgcaatcacgccgaggatcagtacggtgattttacttacccgcagctcttcacgttcggtcgcgccttttttgaagacgttagcgtacaagtcatggctaaccgcggatgcgcccgccagcgtcagacccgcaaccaccgcgaggatagtggcgaaagcaaccgcactaataaaaccgaggaacaggttgccgcccactgcattcgccaggtgaacggccgccatgttgttaccaccaatcagatggcccgccgcgtctttatattccggattcgcaccaaccagcatgatcgcgccgaagccgataataaaggtcagaatatagaagtagcccataaacccggtggcgtagaacacgctcttacgtgcttcgcgggcatcgctgactgtaaagaagcgcatcagaatgtgcggcaagcccgccgtaccaaacatcagtcccagacccagagagagcgcggagatcggatctttcaccagcccgcccggcttcatgatgtcgacacctttcgggtgtaccgccatcgcttcactgaacagattgttgaagctaaagccgacgtgtttcatcaccataaaggccataaagctggcaccgaacagcaacagcacggctttgataatttgcacccaggtggtcgccagcatgccgccgaacaggacgtacatcatcatcagcacgccgaccagcaccaccgcaatgtgatagttaaggccaaacagcagctcgatcagtttacctgcgcccaccatctgggcgataaggtaaagcgccaccaccaccagagaaccacaggcgctaagaatacgaatcggcccttgtttcagacggtaagaggccacatcggcaaaggtgtagcgccccaggttacgcagacgttcggcaatcaggaacaaaatgatcggccagcccaccaggaagcccaggctgtaaattaagccgtcatagccggaggtaaacaccagcgcggagatccccaagaaactggcggcggacatatagtccccggcaatcgccagcccgttctggaagccagtgatattgccgcctgcggtgtagtagtcgctacgagaacgtacgcgtttacttgcccagtaggtaatgccgagcgtaaacacgacgaaaatcaggaacataataatcgcctgccagttcgttggctggcgctctacggccccgctaatagcatccgcggcgttagctgcgaaagggagtgtggcggcaagcgccgtcagaactcttttcatgatgcttgtacctcatgcagttatttcaacttgcttgtacctcatgcaggacttcattattaagacggtcgaattcgccgttcgcccgccagatgtagataccggtgagaacaaaggagatcacaatcactccaacaccaattggaataccgcgtgtgacgctggtgttcggattcagcggcgtgcccagccagccgggcgcgaaggcgatcagtaaaataaagccgatataaactgccagcataataatgctcaggatggtggcaaaccgttgccgtttttcgactaactccctgaaatgcgcattgtcttctatccgctgataaatagtgccattcatcacagattctccagaggtaatgtagggattgttttaattcccgctcccttatgggagaaggttaacgctcgggtaacccttgccgaatgtaggccggataaggcgtttacgccgcatccggcaatcaatgcctgatgcgacgctgtcgcgtcttatcaggcctacaaaccgttaccgactcgcatcgggcaattgtgggttagcttggcatcgcgatagcctgcttctcttcaagcagcttctcgactacgccaggatcggcaagcgtgctggtatcgcccaggttgctggtatcgcccgccgcaattttgcgcagaatacggcgcataattttgccggagcgggttttaggcagggagtcggtccagtgcagcacgtctggcgtcgccagcgggccaatctctttacgcacccagttgcggacttctgcgtacagttctggactcggttcctccccgtgattaagcgtgacgtaggcgtagatcgcctgacctttaatattgtgcggaatacctactacggcggcttcggcaatcttcggatgcgccaccagcgcgctctcaatctctgccgtccccagacggtgaccggagacgttcagcacgtcgtccacacgcccggttatccagtaatagccatcttcatcgcgacgcgcgccgtcgccgctgaaatacatatttttgaaggtggagaagtaggtctgttcaaaacgttcgtgatcgccaaacagcgtacgcgcctgacccggccaggagtcggtgattaccaggctaccttcggtggccccctccagcgggttaccttcgttatcgaccagcgccggttgcacgccgaagaacggacgtgttgcgctaccggctttcagctcggtagcgccaggcagcggggtgatcatgaaaccgccggtttcggtctgccaccaggtatcgaccaccggacatttctcgttgccgatttttttccagtaccactcccacgcttccgggttaattggctcgcccacggaaccgagaatgcgcaggctgctacggtcggtgccttcgatcgctttatcgccttccgccatcagcgcgcggatcgccgtgggtgcggtatagagaatattgacctgatgcttgtccaccacctgcgccatacgggcaggcgtcggccagttgggtacgccttcaaacatcagcgtggtcgcaccgcaggccagcgggccgtacagcaagtaactgtgtccggtcacccagcccacatcggcggtgcaccagtagatatcacccggatgataatcaaagacatatttaaaggtcagcgccgcgtacaccagataaccgccggtagtatgcagcacaccttttggcttaccggtagaaccggaggtgtagagaataaacagcggatcttcggcgttcatctcttccgcctggtgctgatcgctcgcttgctcaaccaggtcgtgccaccacaggtcgcgcccttcctgccagtcaattttcccgccagtacgcttcagtaccaccacatgctctacgctggtgacgttcgggtttttcagcgcgtcatcaacgtttttcttcagcggaatactgcgcccggcacgcacaccttcgtcggaagtgatcaccagtcgactgttggaatcaataatgcgcccggcaacggcttccgggctgaagccgccgaaaatcacgctatgcaccgcgccaatgcgggcgcaggccagcatcgcaaccgcggcttccggcaccatcggcatataaatcgccaccacatcaccttttttaatgcccagctcgagcagggtattggcgaagcggcagacgtcgcggtgcagctctttatagctgatatgtttgctctggctggcgtcgtcgccttcccagatgatggcggtacgatcgccgttttcttgcagatggcggtcaaggcagtttgccgccagattcagcgtgccgtcctcgtaccatttaatggacacattaccgggggcaaaggaggtgtttttcaccttctggtaaggtttgatccagtcaagaatttttccctgttcgccccagaaggtatcaggtacgttaatagattgttgatacatcgcctcgtactgctgagggtttatcaggcaacggtctgcgatgttggcaggaatggtgtgtttgtgaatttggctcatgcttttgttctccttgtaggatgttaataatatgtggcataagcgttaaatgtaggggtattggcagttttgtttagtatttgggcgacagatcacgcaaaagtagaattgtgcaaataaacggcagggtaatttttgaaggtcagcaacaaaagttgattaattctttgaggaacatgcagttatgcatgctgttgaaaaagaggaagatactgactaactctaaagtggtattttacatgcacttacaattgattaaagacaacattcacagtgtggttatttgttacacataggggcgagcaatgtcatgacagtgtaggtgcggttactgtcgtgaaaaacaataaaaaccgccattgcaacaatggcgcaattcggatgaagcccctatgacaaggataaaaataaacgcacgccgtatcttcagcttattgattccttttttctttttcacttctgttcacgctgaacaaacggctgctcccgcaaaacctgtaactgtggaagcgaagaatgaaacctttgccccgcagcatcccgatcaatatctctcctggaaagccaccagcgaacagagtgagcgtgttgacgccctggcggaagatccacggctggtgatcctgtgggcggggtatcccttcagccgcgattacaacaagccgcgtggacatgcttttgctgtgaccgatgtgcgtgaaaccctgcgtaccggtgcgccgaaaaacgctgaagatggtccgctaccgatggcatgctggagttgtaaaagcccggatgtggcgcgtctgatccagaaagacggcgaagatggctacttccacggtaaatgggcgcgcggcggtccggaaatcgtcaacaacttaggttgtgccgattgccataacaccgcctctccagagttcgccaaaggcaaaccggagttaaccctttcccgtccgtatgcggctcgcgcgatggaagccattggtaaaccttttgagaaagccggacgtttcgaccagcaaagcatggtttgcggtcagtgccatgtggagtattacttcgacggcaaaaacaaagcggttaaattcccgtgggatgacggcatgaaagtcgaaaatatggagcagtattacgacaaaattgccttctctgactggactaactccctgagcaaaacgccaatgctgaaagcgcagcacccggaatatgaaacctggacagcgggcattcacggtaaaaacaacgtgacctgtatcgactgccatatgccaaaagtgcagaacgccgaaggcaaactctacaccgaccataaaattggtaatccgtttgataacttcgcccagacttgtgcgaactgccatacccaggacaaagctgccttgcaaaaagtggtcgcggaacgtaagcagagcattaacgacctgaaaatcaaggttgaagatcaactggttcacgctcacttcgaagcgaaagcagcgctggatgcaggcgcgacggaagctgaaatgaagccaattcaggacgatatccgtcatgcccagtggcgctgggatctggcgatcgcttcccacggcattcatatgcacgcaccggaagaaggtttacggatgctcggtacggcgatggataaagcggcggatgcacgcaccaaactggcgcgcctgctggcgaccaaaggcatcacccatgaaatccagatcccggatatcagtaccaaagagaaagcccagcaggccattggcctgaacatggaacaaatcaaggccgagaagcaggacttcatcaaaacggtgatcccgcagtgggaagaacaggcacgtaaaaacggtctgttaagccaataaccccgttccgcctcgcaaggggcggaaaacacaatggagtgaatatgagcgtattacgtagcttattaactgccggggtgctggcgagcggcctgttgtggagcctgaacggaattaccgctacccctgcggcgcaggcatctgatgatcgctacgaagttacccagcagcgtaacccggatgccgcctgtctggactgtcataaaccagataccgaaggtatgcatggaaaacatgcttccgttatcaacccgaataacaaactgccggtcacctgcaccaactgtcacggccagccaagtccgcaacaccgcgaaggggtgaaagatgtgatgcgctttaacgagccgatgtacaaggttggagagcagaacagcgtctgtatgtcctgtcatctgccggaacagttgcaaaaagcgttctggccgcacgatgtccacgtaaccaaagtggcgtgcgccagctgccattccctgcatccacagcaagatacgatgcagacgttaagtgacaaaggacggattaagatttgcgtcgattgccacagcgatcagcgcaccaatccgaactttaacccggcgtctgttccgttgcttaaggagcagccatgacctggtctcgtcgccagtttctcaccggcgtcggcgtgctggcagccgtcagcggcaccgcagggcgcgtggtggcgaaaacgttgaatatcaatggggtgcgttacggcatggtgcatgacgagagcttatgcatcggctgtaccgcctgtatggatgcttgtcgggaagtgaacaaggtgccggaaggcgtcagccgcctgacgattattcgtagcgagccgcagggcgaatttcctgatgtgaaatatcgcttcttccgtaagtcttgccagcactgcgatcatgcgccgtgcgttgacgtctgcccgaccggtgcgtcttttcgcgatgctgccagtgggattgtcgatgttaatccggatctctgcgtcggttgtcagtactgcatcgccgcctgtccgtaccgcgtgcgctttatccatccggtcacgaagacggcggacaaatgcgatttctgccgtaagaccaatttgcaggccggtaagttgcccgcgtgcgttgaagcttgcccgaccaaggcgctgacgtttggcaatctggacgatcccaacagtgagattagccaactgctgcgccagaagcccacttaccgctacaagctggcgctgggaaccaaaccgaagctgtaccgcgtaccgtttaaatacggggaggtgagccaatgacgcagacttccgcatttcattttgaaagcctggtgtgggactggccgattgccatctacctgtttttgattggtatttctgctggtctggtgacgctggccgtgctgttacgtcgcttctacccgcaggcgggcggtgcagacagtacgttgctgcgcaccacgctgattgtcgggccgggcgcggtgatcctcggtctgttgatcctcgtcttccacctgacaagaccgtggaccttctggaagctgatgttccactacagttttaccagcgtgatgagcatgggggtgatgctgtttcagctctacatggtggtgctggtgctgtggctggcgaaaatctttgaacatgatttgcttgccctgcaacaacgctggttgccgaagctggggatcgtgcaaaaggttctgagcctgctgacgcccgttcatcgcggactggaaacattgatgctggtgctggcggtgttgttgggggcttataccggctttctgctgagcgcgctgaaaagctatccgttcctcaataacccgatcctgccggtgctgttcctcttctccggcatcagctccggtgcggcggtggcgctgatcgccatggcgatacgccaacgcagtaacccgcattccacggaagcgcagtttgtacaccgtatggaaatccctgtggtatggggtgaaatcttcctgctggtggcgttttttgtcggtctggcgctgggcgatgacggtaaagttcgtgcgctggtggcggcattaggtggcggtttctggacgtggtggttctggcttggtgtcgccgggctggggctgattgtgccaatgctgctcaaaccgtgggtcaatcgcagttccggcattcctgccgtgctggcggcgtgtggggccagtctggtcggcgtgttgatgctgcgctttttcattctctacgccggacagttgacggtggcgtaagccagaaaagaggtggtttctggacgtattccttcctgaagtcggttttctggcgttgttgttaagtctcggggtcaacgtgttgaccccgttgacggccttcgcgggagtgcggttgcgctggcctgccatgatgcgactcacttgcatcggcattctggcgcagttcgcgctcctgctgctcgcctttggcgtactgacgtattgttttctcatcagcgatttcagcgtcatttatgtcgcgcaacatagctatagcctgctgagctgggaactcaagctggcagcggtgtggggcggccatgaaggtagcctgctgctttgggtgctgctgctttccgcctggagcgcgctgtttgcctggcattatcggcagcaaaccgatccgctatttccgctgacgttagccgttttatctctcatgctcgccgcactgctactgtttgtggtgctgtggtccgatcccttcgtgcggatatttccaccagcaatcgaaggccgcgatctcaatccgatgctgcaacatcccggtcttatctttcatccaccgctgctttaccttggctatggcggtttgatggtagcggcgagcgtggcgctggcgagtctactgcgcggcgagtttgatggtgcctgcgcccgaatttgctggcgctgggcgttacctggctggagtgcattaacggcggggatcatcctcggttcctggtgggcctactgcgaactcggctggggcggctggtggttctgggatccggtggaaaacgcctctttattaccctggctttctgccactgcgctgctgcacagtttgtccctgacacgccagcgggggattttttgccactggagcctgttgctggcgatagttactctgatgctgagcctgctgggcaccttaattgtccgttctggcattctggttagcgttcatgcgttcgcgctggataacgtccgcgccgtgccgttgttcagcctgtttgcactgattagccttgcgtctctggctctgtatggctggcgagcgcgggacggtggcccggcggtgcattttagcgggttaagccgggaaatgttaatcctcgctacgctgttgctgttttgcgcagtgctactgatcgtgctggtgggaacgctttatccgatgatttacggcctgctgggctggggacgcctctccgttggcgcgccgtattttaaccgcgcgacgttaccgtttggtctgttgatgctggtggtgattgtgctggcgacgtttgtctctggcaaacgcgtgcagcttccggcgctggtagctcatgcgggcgtgctgttatttgccgctggggtcgtggtctccagcgtcagccgtcaggagatcagcctgaatttacagccgggtcagcaggtgacgctggcaggatacaccttccgttttgagtgcctcgatctacaagccaaaggcaattacaccagcgaaaaagcgatagtggcactgtttgaccatcagcaacgcattggtgaactgacgccggagcggcgtttttatgaagcacgccgtcaacaaatgatggaaccgagtattcgctggaacggcatccatgactggtatgcggtcatgggggagaaaactgggccggatcgttacgcttttcgtttgtatgtacaaagcggtgtgcgctggatctgggggggaggattgttgatgattgcgggcgcattgttaagcggatggcgggggaagaagcgcgatgaataaagggcttctcacgctactgctgttatttacctgttttgcgcacgctcaggtcgtagacacctggcaattcgccaatccgcaacaacagcaacaggcgttaaatattgccagccagttacgttgtccgcagtgccagaatcaaaacttactggaatccaacgcgccggtggctgtcagtatgcgccatcaggtttacagcatggtggcggaggggaagaacgaagtcgaaatcattggctggatgaccgaacgctacggagattttgttcgctataacccaccgttaacgggtcagacgctggtgttatgggcgctgccagtggtgttgttactgctgatggcactgatcctctggcgagtgagggcgaagcgatgaaacagcccaaaataccggtgaaaatgctgacaacactcacgatattgatggtatttctctgtgtcggcagttatctgttaagcccaaaatggcaggcggtacgtgcggagtatcagcgtcagcgcgatccgctacatcagtttgccagccagcaaaccccggaagcgcagcttcaggcattgcaggataaaatccgcgctaatccacaaaacagcgaacagtgggcgttactgggcgagtactatctgtggcaaaacgattacagcaatagcttgctggcgtaccgtcaggcgttgcaactacgtggtgagaacgctgaactgtatgcggcgctggcgacggtgctttattaccaggccagccagcatatgaccgcccagactcgcgcaatgatcgacaaggccctcgcgctggacagtaatgaaatcaccgccctgatgctgctggcttccgatgcgtttatgcaggcgaactacgcgcaagccatcgaactatggcaaaaagtgatggatctcaacagtccgcgagttaaccgaacacagctggttgagagcattaatatggcgaaattgttgcagcggagattggattaatcatctggtgatgaagattatgtcattgagctgcataaaaaataatcgaatgaacatatgccaaaaataatcactaatcagtattattgcagattaaacaaataaaaatctttccataacaaatggttattcattaatcctgccataaactcgcgttattatgcattaatgcagcgaaaagctctgttgttaaagggttgcgcaacataccgcgcaaatgatactgatcataagcgttaaaaaaatctacaaaccaacgcaacacaattcatgccccggcagtatgtcacgttctcgcgtttctgaacggggaacggcgctccattgaggaagtcattcatatgaaaaatataaaattcagcctggcctggcagattctgtttgctatggtgctgggcattctcctgggaagctacctgcactaccatagcgacagccgcgactggctggtcgtcaatttgctctctccggcgggtgatatcttcatccatctgattaaaatgattgttgtgccgattgtgatctccacgctggtggtgggtatcgcgggtgttggtgatgccaaacagctcgggcgtattggcgcgaaaaccattatctacttcgaggtgatcaccaccgtcgccatcattttggggatcactctggcgaacgtcttccagcccggtgccggggtggatatgagccagttggcgaccgtcgatatcagcaaatatcagagcactacggaagcggtacaaagcagttcccacggcattatgggcacgattttgagcctggtgccgacgaacattgtggcgagcatggcgaaaggcgaaatgctgccgatcatctttttcagcgtgctgtttggtctggggctttcttccctgcccgcgacgcatcgtgaaccgctggtgaccgtgttccgctccatctctgaaaccatgtttaaagtgactcacatggtgatgcgttatgcaccggtgggtgtgtttgcgctgattgcggtgacggtggctaactttggtttcagctctctgtggccactggcgaaactggtgctgctggtgcatttcgccattctgttcttcgcgctggtagtgctgggaattgtggcgcgcctgtgcgggttaagcgtctggatcctgattcgtattctgaaagatgagctgattctggcgtactccactgccagctctgaaagcgtgctgccgcgaattattgagaagatggaagcctacggagcaccggtgagcatcaccagtttcgtggtgccgaccggttactcttttaaccttgatggtagcacgctgtatcaaagtattgccgctatcttcatcgcgcagttgtatggcattgacctgtccatctggcaggaaatcattctggtgctgacgctgatggtgaccagcaaagggattgctggcgtgcctggcgtgagctttgtggtgttgctggcaacgctgggtagcgtaggtattccgctggaaggtctggcgtttattgctggtgttgaccgtatcctcgacatggcgcgtactgcgctgaacgtggtgggtaatgcgctggcggtgctggtgattgccaagtgggaacacaaatttgaccgtaagaaagcgctggcttatgagcgtgaagtgctgggcaaatttgataaaactgcggatcaataattgaagattgccggggatatccacccggcaatgtgtgaatgcctgatgcgacgcttgccgcgtcttatcaggcctacgccagacagcgcaatagcctgatttagcgtgattttgtaggtcggataaggcgtttatgccgcatccgacatcaacgcctgatgcgacgcttaacgcgtcttatcaggcctacgccagacagcgcaatagcctgatttagcgtgattttgtaggtcggataaggcgtttacgccgcatccgacatcaacgcctgatgcgacgcttgccgcgtcttatcaggcctacgccagacagcgcaatagcctgatttagcgtgattttgtaggtcggataaggcgtttatgccgcatccgacatcaacgcctgatgcgacgcttaacgcgtcttatcaggcctacgccagacagcgcaatagcctgatttagcgtgattttgtaggtcggataaggcgtttacgccgcatccgacatcaatgcctgatgcgacgcttgccgcgtcttatcaggcctatcttaaccgttggttaatttttcaaactcttcacacccggtatcaaacccttccatacagctcaggttcaaccagtgcagcgccttttgcttgttcttctcgataaaaccttcttcaccgtttaagaacatcattcccgcccagtactcggaataaccggttcgggaaattgcagagctgcgtttgaaataccaggttgccttgtcatcgtcggccttaatgcccacgccgttggcgtaaatcaaaccaagcagcatttgggcatcgacggcagagtcgttctccagatcttcgctggcgttttctaacaggctaattgcctttggataatccggtttacccgcttgagtatttaccagaatatgcgccagcgttacttcaccttctttactgcccgcttgcgccgctttctctgcaagaacttttgcttgtggatagtccagactgaccggattggtgattttgatctgcgccagcagcgcgcaggcatcagcatcaccgctgtcggcggctttctgtgcccaatattcggctttgctcaaatcgccggagctaaaccagctgtcggcaagaaaatattgtgcgcgtcggtccccggcctctgctgcctttaaatactggctgccaggctcggagtcgttggcgtgggcaaagaatgtcaaaaacaacatcaatgcgataatttttttcattttgataatacgattgggtagggagtaaccagtataaagagttcgaatggataaaaaaacagcctccgaaaggaggctgtagaaaggacggtattacgccagtgccgcttcgcgcaggcgagttttcaacttgttgtactcgtcaatcacgtactgctcggcggcgcgctgatcggcgatcggctcgacgcgaacggcgcagtatttgtactccggcgttttcgtaatcgggcttaagttttcggtaaccagctcgttacaggcaccaatccaccactggtaggtcatgtaaatcgcccctttgttcggacgatcgctgacctgcgcacgggtgataattttgcctttacggctgtgcacccaaaccaatgcctcatcttcaatacccagacgtttggcgtcttcggtattgatttgtgcgtagccaggttcatcagccagcgccgccagtgccgcacagttaccggtcatgctacggcaagagtagtgaccaacttcacgcaccgtactcagtaccatcgggtactcgtcggtgagtttgtcgattggcgctacccagtcgcaggtgaagaactgcgccagaccgttcggggtatcaaacttctctttaaacagataagaagtcccctgatcggcatcactagtatcgcggcaaggccactgaatgaagcccagttcgcccattttctcgtaagtcgcaccgtagaaatccgggcacagatgacgcaactcatcccagatctcctgggtgttgttgtagtgcatcggataacccatacgggtggcgatttcactgatgatttgccagtccgttttcagatcccatttcggttcaaccgccttgaagaaacgctggaagccacggtcagccgcagtaaacacgccttcatgctcgccccagctcgtactcggtaaaataacatccgccgcgctcgcggttttggtcataaagatgtcctgaacgataaccagttccagatcttcaaaggctttacgtactgcgctcagctccgcgtcagtttgtagcggatcttcgcccataatgtacgcggcacgcacttcgccatgcgctgcgcggtgcggcagctcgctgatgcgatagccggtatgcgctggcaggctttccacgccccaggctttggcgaatttctcgcggttagccggatctttcacgtactggtatcccggatacgtatccggcagcgcgcccatatcgcaggcaccctgaacgttgttctgaccacgaaccgggttaacacccgcatgcggcttaccgaggttaccggtcagcatcgcgaggctggtcagagaacgcacggtttccacgccctggtagaactgggttacacccatgccccacaggatggcggcgcttttcgcctgggcatacatccgtgccgcctgacgaatctcactggcgctgacgccggtgatatcttcaacgctctccggcgtgtagccttcaacgattttacgatactcttcaaagccttctgtacgactagcgacgaacgctttgtcgtacagattttcttcaataatgacatggcccatcgcattcaacagcgcgatgttgctgccgtttttcagtgcaatgtgcatgtcagcaatgcgcgcggtttcaattttgcgcggatcgcagacgataattttcgccccgttacgtttagcgttaattacgtgattcgccacgattgggtgggaatccgccgggttgtacccgaaaacgaacactaaatcggtattatcaatttcgttaatagcattgctcattgcgccattaccgacgctttggtgcagacctgcaacgcttgggccgtgtcagacacgagcgcagcagtcaacgttattggtaccaataacggcgcgcgcaaatttttgcattacatagttggtttcgttacccgtaccacggctggagccggtcgtctggatggcatccggaccgtacttctctttgatggcgctcaggcgctcggcaacgtaattcagtgcctcatcccaggaaacaggttcgagtttgccgccacgctggcgacggatcatgggggttttcaggcgcggggtcaggatctgggtatcgttaatgaagtcccagccataataacccttcagacacagggtaccctggttggttttcccctgcgctgcctccgcccggacgattttgccgttatcgacgaccaggttgattttgcaaccacttgcgcaataggggcaaaccgtgacgacttttttcatcggtctcgctccagttaatcaaatcacgcatacgcgctctcgactacagtatgcatcttttatgccacattttatgtggggtcattccctgatattacgggcactatttattcaaaactctgacgaaaaacaggctgtcgtcagttttgacgtgacgaaacgaaataccgcgtgacagccatcacgcggcagacattttattttttctcgacgacgggacctgcctgatacccgccgcccaggcttttcatcaactgaatgctttggatcacccggcggctgtccagcatcagtaaactcatctcttcggcaagcactggcaaccgggcttcggtggcctgtaagcggctggttaagccgcgctgataggcggcctcggcagcgcgctgggtaaagcgcgtggcttccacgcgttcagcctgcatttctcgctcgtcgttgagcgtttgcagacgcgtgccgttgacggcaacgtcacgcaccgcgttcagtacactctggttgtaacgttcaatcatcatgttgctggcggcgcgcgtgccttcgagattggcattcaaccgtccaccgtcaaacagcggcaatttcagacccgggatgaagttgaactggcgactggtttttttgaataaggtatgcagatggatggagtccagaccgaaaaacgctttgatatcaaagctcggatagaacaacgcccgcgcggaatccacctgatctaaactcgcctgaacataccagcgcatggcttgcagatccgggcgtctggcgagcaactcataagagagtgtcgccggaatgccggtctggacttgcggtaatgccaccggtctgatctccggcatatcgctggctcccgcgccaatcaatgcacgcagagattctcgcgtttcggtgatttgccctttgacggcaacaatttgtttatcgaccgccagaatctgtgcccgcgcgccgtggaaaggcacttgcgcttccagaccgtgcgccactttactctggtgcgctttcaccgcgtaatcaatcacatcgtgagtttgttctaacagatcgagcatctgatagctggcctgcatactgtaataaagctgcgctacgcccgtggccaggcttagctctactgctgcggtttctgccagcgcggcattatgcgcgccaatggcggcggcaaccgcactgcgatgcacaccccacaaatcaagatccagtccggcaaacaaacctactgtggcttccgtatagtacggcccgtccatacccagtgctggcgcatccatactataagggcttaaaaagccgttcgcgctgacacgttggcggttgagcatccctaacgctgcgacctgtaattgactaccggcatctaacaaatcggcctgggactgcgctttttcttcccgcagtttcgcttcggcgagggtgtgactaccacttagcgtccgttggatcagcgcatccagctgcgggtcattgagttgtttccaccactgcgcctgcggccagccggagctggcaagatgaatatcgtcggccagtttgatttgttccggtttgagctgttgatgaggtgcagaatccttacgtaccagggcacagccggaaatcagcgtcgtgctgccgagaatgctgcacaacagcagacgactaagttgacgattgatcattgcgtggctccttgtgcctgttccgtggcgggcgttaatgccggggctgtccagtctggcaagcgggcgaaaagctggcagacgtgttgctcctgttttaataaggtgggcaggatggcctgagaggcgggtgtctcttcaagcgttatttgaggagaacggctgagtgcggttgccagaccggcagcgtatttctccagggcgtcggcaaactgacctgctctgtccggctgtagtgcgttatccagcgcctgcgcgctgttccaggtggcatcccaggcgtgaagaagatcgcggccctgacgaataaccgtttggctacgttcaatcagtaatgcgcgttcttcgctgtccagttgacgctccagcgccacgcgttggcacatctcttcacaggcattaaacgccgcatgcagaccgatacgaatttgcagataagtgcgcagagccgtgacttcctgctggcgtgggatccgcattactttacttaacatacccagcgtgccagccagtttttgcggcagtgtgcgcgcttcactttcaggccagacaaaggtgtaaatcaccgcggacaccacggtaccaatgatgatacccagggcgcgatcgcgaatttccaccaggtcgtacactgggccaaaaacgttttcgagcgtggcgagcgcgaaggtgaccaccatctgtgtgccgatataagaagagcgttcagagctggtggcaatccatgcgcccaacaggaaaatcggtgccagcacaaacagcaattcgacaatattgtccagccagggcatgaccagtagcgtgaataacagcgccagaatcgcgccgcaaaaggccccgccaaaacgcagcaccatcttctggtagctgctaccgacatttgggttagcgacgatcacgcatgtcagcatacaggtgtgaatgccttcccagtccacgccgctgtaaaaggtgtaacagatcaaacaggcgagcagcgtttttaccgcgtagcgcatatagtctggattggtaaaagcatcggcggccatacttggcggtttggctgcgggcgttggcggcgtattcgggtccatctgacccagttgtaacaacgtctggcagatattctccaggttacattcccgtgccgccatcgcttcactttcactgatccgccagtcgctttgccagcactgaccttcagcaacggcatgctgcagcttgttgatttcactagctaatttttgtcggaattcaataattgcctgagaatcagcaaaagaggtgggatcgtagcgattcagcgtgctgtaaatgtaggttaccgttgccacgcagctttgccaccatgcgttttgagttcgccagttggcatcgtccgcgaggcaaaagacattgagtttttgtagcgccagcgcctctctttcaatccgcgtttcgggtagcggtgcgaggctgtctgtcaggtgactaatggcatcatcaagccgatcattaagcgcctgatgcatttggctaatggcacgactgggaaaccacagcacgccgattaacgtcatcagcaaggttggatagaggccaacaacgatacaccacagcgttaagcgcacgaccacttccggatagtcgagcatggcggggaaggtttgcccgtaaatagcgacaatggcgacggcgaaaaagaccagccccaagcgatgggtgcgcatcaaaaacatgcagcccatcaggatcggtccggcgatgatcaatcggatcaacggttcgccgtaactccatttgtagatcaaaaacaggctgccgatctccagcaccgtggcaaccacaaacaagatcgcgacaaatttggtgtaaaacgcgttgctctgaataccgtaaaacagcactgccaggcttaacgccacaaaagggatctcaaaggtcatgctgatcagaatcaccagcaggcagcctacccagagttgcacggtctgcggcacgcgacctggtcgccgctcgcttaactcttcatgaaagaacgccagcagcctgaccaccggtaatggcagggagttgagcgcgctcattattgcggctcaagattagcgactgcgctagcgccgatgcggaacatttccgggtcaggtttatcgaccatgattttgaccggaaaacgctgggcaacgcggacccagttaatagaacgagacactttcggcaggccgcccagcaccaggccgccgtcatccggtagcacgccgtagccaatgctatccactttaccctcgaaggttttgccgctgtcactcatcaggcgaatcgttgcgggtgtaccactgcgaatatttttcagatcggtttcgcggaagttggcgatcacataccagtgacgagtgtcgattagggtaaaaatagggcgcatggcagaagcaaattgcccgacggaggttttgagggaaatgacccggccatcaaacggcgcgcgaacggtcgccatttccagatgcagtttggtcagggcaatatccgcttcgaccgccgcacgctgggcaactaatgcatccacgccgctgacggcgctggcggcactctgcgcctgtaacaatacggcattaagatccgcttctgcggcgcgctgcgccgttcttgcacggtcaacatcttccgcactgacaaaaccttctttcagtaatggctcggtgcggcgtaatgtatctgtggcctgtttcgcggcggcacgggctttttctaccgtggcattaacgctgtcggcaccaaactgttgcgcgtcaacgctacgctgggtgagcataatttgcttatccagcgccgcgagggaggcttcagctttcgccagattggcttcgtacgggcgcgggtcgatgcggaacagcaaatcgccctgtttgactgcctggttgtcggtgaccgccagttctacaatgcggccgctgacttccggtaccacatcaatggtatctgcactcgcgtaagcgtcattagtacttggcgcactgtctacgcgccagataacgaaaacaagggcaaccagcgccaacgcaaccactaacagagcagggaatttactgcgaggagcttttttcggcgtactttccatgagcgcgtctcaaatagattagaaaaatgccagccagaacagcatggcgtagagagcaaaaagggcggtataaataattccgacaaatgccagattgatatttgcccgctgaataactcgcctcgtgatgagcgtcaaaataaggctggcaatggcgcagaaaaaccagctgggataataagcgccgatcaccgggattgccggagataatgagcatcccgaaaccatgaagacgggaattatccaggctgtttttttgagttgcatcgccatgcgagagagaactgttggcatattaaatacatcctgtctgctgcgaacaatatctgtagtgaatatcaatatccattgaaggcgtcagtatggctattttcttgatgaataaaaatagctttattcagccaccgcattcataacttatatattttatttattaattggctgtatatatttttaaaataaatacttttgggggcttcagcgcccccaaaagcgagtgacattaatttggggttacgatattcacccacaaatcgaaattatccagacaggcgataatttcttccagtttcgcgccattgccaataattttggctttcttcgcttttaccagatccgccattttggcttgtccggtcagcacggcgtgcagatcttcacggctgatgtagaaagaggcgtcggcttgcggttgcagcgttttccggtagttaagcacgctatcgttcagcgtcaggttgaggttatcgccgttgctcatattgaagttcaggctgatatttttacccgcagctttcgcgctatcgaggcgaacggccataaagtcgaacagcatttcgacgctcatcccgcgaatggtgtccggggaaccggtggtgccgtggctgaacttatgcaccccttcgcgcagctctttcgcgccggtcaggtagaaaccgcgccatgtggcggactcggcctgatagcccagctgttcaaagttattcgcttgcagattcttcgcgacctggtcacccgggttggcggcaatcacctgtttcagcagttctgcgctccagcggtaatcaccttgcttgttcgcttcttgcgccaggttgatgacacgggcagaaccgcccagcgcctgcacgtaacgtttacccatctccacctgaccatacggatgcaggttagccgggttaccgtcgtaatagccaagatagaagttatacaccgcgcgggcgttgtggctgacagaaccgtaatagccgcggctggcccagttattggcaagtgcaggcggcagcttaatcatgtcgccgatttcattcatggtgtagccctggttcgccaggtgcagggtctggtcgtgaatgtacttgatggtatcgcggtatttaccaatataatcattgatatgcttattgccccagaccggccaggtgtgcggcataaacagcacttccgcgtcgttaccccacatatccagcgtttcgttcagatactcggtccacttgctggtgtcgcgggttttcgcgccgcgcagagtgtagaagttgtgcagggtatgcgtggcgttctcggcggtacacagggctttcagggccggaatatagaagtgcatttcggctggcgcttcgctacctggggtcatcaggaagtcaaactccaggccgtcgataatcatcttctcgccagttctgacgatagttttcgtcggtgcaataatgctcgggtcgcccgttgccagcgtcacgccaaggccattacccacattgccttgcgcgttgtgcggcagtaacagaccgtaagagtagagcgcacggcggctcatgatgttacccgccagcacgttttcgctgatggcttcgtccataaagcctgcaggggcaatcacctgaactttgccggatttaacatcggcttcagagataatgcctttcacgccaccatagtggtcggtgtggctgtgagtgtagataacggcaacaatcggtttttgcggacgatgctggaagtaaaggtcaagtgcggcttttgcggcaggcggcgtcaccagcgggtcgataacaataatgcctttctcgccctcaacgaacgtaatgttagagatatcctggccgcgcacctgatacattttatcggtgactttgaacaggccagaaataccgttgatttggctctgacgccacaggctggggtttacggtttccggcgctgcggcattaatatcaaatttgtaatcgtccgcgcggtagtaaactttaccgttcgcatcacgcagaataccttcatccagcagcggggcgataaatccacgctgggcatcgtcaaaatcctgacgatcgctaaacggtaaacttttggcgtaattctgattaacctgttgggtatattgagtggcggctttcgcttcctctttcgcgttagcggtatttaccatcatgccgctggcggcagttaacgcaataacaatcctgctcaaacggaataaccgagagttattcatataaatctccatttatcatttatgtcgtaaatatgtaatccatgcaaaatacgtcatttaaagctggcgttatcataattgggaaattgcgactttaataagtggaagtgtgagcggaacgcgccattttattaggcatttgtgctgaagagggaaaattacagtaaaactatcattgcagaaaataatatgagtcgttttatgtgtttattatatatattgtacctgtcgttggcacagcgggacattgcgctactgtgccaacgttttactcatggggctttagcacagaactgtggcaaaaaacgttgatgcgccaatattgctgcaccctgagcgccattaaagtcagaagaactggcggcaataaagcgcacgacctgatgcggcagtggacggcgcaggtacttttgggtcatggcaacgagagtctcgcgtgggaaggcgggcatatccatcacgccaccgcccaggatcaccgcatcgggatcgaacagattaatgctggtggcaatggcccgtgccgcgttttcaagcagactctggacgaaaggggcgttttccgcatggacgaaaagatcgcgcaatgggtaatttcggggctgttgttcgtaccagcgtcttagcgccattccagagcaattggtttccaggcacccaggattgccacacgcgcagtgttgggtcatatctcccagggggatatgacccagttcgcctgccacaccgtgtgcacccgtccacggcgcaccgttcatccacactgcgaaccccatccccgtaccgagataggccgccagaaccagttgttgcgtaaggcggttttctactacgtcccaggagagttgcaggttaacgtcgcgggaaaactcaaccggacaattcagcgtattttcgagcttatcggcgagatcatataaatccgccgctgttaacggcaggttaggcgtagaaataatggtgcgtttatctttactgaccagcgccggaaatcccatcaccagaccatgacagcgagcgttaaagcgcctgagttgctcgtcaatcatttcgccgataccgctcaccaggccgggagcaatgacttctgcggtccgctttttttcgcagtgtagcgtttcaccttctgctgtccgcagacaaaagcggatatgcgttgcccccatatccacgcccgctacgacgttatgctgtttttgcatgaggctgtacctcgctttttgcagccagaatctgcgcggtcataattctccatgcttcgtcgatattttccgcatgattaaacaggccggaagtgccgacgataaagacatccgcccctgccgccatcagtttttcgtaagttgcctggttgcaggaaccgtccacctcaatttcgtactccagaccttctcgttcacgccatgccttcagttcggcaagtttatccagcatttcaggaatgaacggttgtccggcaaagccgggatcgacagtcatgaccgtaattttatcggccttatggatatagtatttcatggcctcaactggcgtctccgggttaaggatcagccccactttcatgtcatgacggcggatttcatcaatcaggcggaacgcctggccgttgatggtttccggatgcagagtgatgaaatctgctcccgcacgcgccagttgagcaatgtaatcctgcggccgcgtcaccatcagatgacagtcgagcggtttagttgccagttttttaacctgacttacgaagaacggactgagtgtcagattggggacaaagtgaccgtccatgatatcgatgtggaagtaatcggcatggctgtcgataaattcgatctgttctttaaatttcagcagatccatacacattaagctgggggagattttcatgttcaattccttacttactgataagacggtcaagggcgacagccgcgataattaatccgcccatcaccaccagttggtaataggtttgtacctgcaaaatattcagaccgttgttgatggtgccgatgatcaacccgccaatcaccacagagaaaatgcgccccttgccgccgaagaaactggtgccgccaatgatggcgctggcaatggcataggtttcaaaacccataccggcaagcggttctgcggcaccgagtcgtgcagtactgacgacgcctgccagacctgcacaaacaccggagatgataaacaccaccaggatgtggaatttcacgtcaatcccggaatagaacgcgctatttttgttgccgcccagtgcgtagatgttgcgcccgagccgcatacgcgttgtcagaaaccaaaggatgagcgcgacaattagactgaagataacggggacaggtatcccaattacgctggcggcaaagaagttcacgaagtcaaaactgaagccgtatacgctgttggcatcggagatcaccagcgtgatcccacggaaaatcgcgttggtgccaagggtgatgatgaacgggtgtagccccgtccagttgaccaggcagccgttgatcgcccccagtgcgccgccaaccagtacaccgccaatcatcgctgcgagaaacgggtcaacacctgccaacatcagtttggcggtcaccataccggaaagcgccagaatcgcgccaacgctgaggtcgataccagcgaccaggatagcgaaaaactcgcccatgccgatcaataccgtcacggagctttgaacaaaaatctgggtaatattattggtggtcagaaaatattctggactcaggctaccaaagatggcgacgatgatcgccaggataaaaaaggtgccgtatttatcccagaacagcgcaaagttgaacggtttcttctcgctcgcttcgctttttactcttgtggtaaagcccatgccataatctcctcttcgctcatgtcatcgcgattcgtcaggatttgcgtcagtcgtccttcgcagaacacggcgatgcggtcgcagacggtgataatttcaggtagttcagaactcaccatcaggatgacttttccgtcgtccgccagttggcgcatcactttgtaaatttcggctttcgcgccaacgtcgatgccgcgggtaggttcatcgaaaataatcacttccgggcaacagcacagccatttggagatcaggactttctgctgatttcccccggagagttcggtgatattctggtttacgctatgacatttcagcgccagcagttcgcgttgattttcagcggtacgttgctcgtcaacttcatgaaacaagcccatcgcgcctttatagccgccgtctttcagactgcggctgatcgccatgttctgagcgatggaaaagttggggaaaaaaccgttatcccggcggctttcagtgatgtaagccatcccttttttcacggcatccaggggactacgtggagagatatctttgccattaagacggatttctccgccagcgcgtttatccacgccaaacagacaattcatcagttcagtacgtccggaaccgaccagtccggcaaagcctaatatttctccccggcagacgctaaaactgatatcccggaccttttttctgtcacgactggtgacgttccgcacctcaaaaaccgtttcgtgcgcaaggttgctgacattctccttcatcgcgttaaaacggttttgcagttcgcggcctaccatcagacggacgatatcgtcattactcacatcgcttactatgccgctgcaaacgctgctgccgtctttcatcaccgtatagcggtcgcaaatacggcgaatttccgccaacttatggctgatatagacgatggccgtaccctctttacgcaactgattcatgatcagaaacagatagtccacctctttattggtgagactggaggtgggttcatccatgatgatgactttggcatcgagcatcagcgttttggcaatttctagcatctgcttgtggctgatagataaattcgccactttctcatctagatcaactttcaagcccacgcgtaataacatcatggcggcgcggacacgcatttctcgccagtcgataatattgacgccacagatttttttcgtcagatgacgaccaatatataaattttccagtacggttaattcatcaataacgctgagttcctgataaataatcccgataccgagttgtgccgctaatttatgatccagcttgttatagctaatgttattaatggtaatggtgcctttggtcggctcatgtattccggataaaactttcattagcgtggatttacccgcgccattttctcctagtaatgcatgtatttcaccaggataaaccgttaaattaacgctctttaatgcgtgaaccggaccaaaggacttgccgatccccgccatgcttatatatggcgtggccataaataacctctctgcacgaaatatcgtattattgcctgatggctacatttatcaggtctacgttcaggttattttgttggccggataagacacttcattagcatcatcatccggcatcattcagttttattgagtgaccaggatactatcgaccagtttaaattccggtgctttatccagcgggataaccttgccggatttctcagcgtcaaccatcagcttcagacccgttgcgccgatatccgccgggttctgggcaaccgtcgcggtcatttgtccggcttccaccattttgcgggcttccggaatgccatctgtaccgacgaccagcacttttcccgtttttccggcgtttgcgactgcctgagcaacacccattgccatcgtgtcattcgcgcaatagatcgctttaatattcggattacgttgcaacacgttagtggcgacatccagtgctttaatgcggtcccagtcggcaggctggctggcgacaagcttgatctggcttgcttttttgaaggcttcggtggcaccattacgacgcgcttcaccggaggcgttaccggctttaccctcaatgattgcgacttcaccaccttcagcgcccaatttgtcaataatgaagctcgcgcctttcgccccgacagcaacgttatcggtggtgacaaaagcttccacattgccgccagcttttttcagattatccatgtcgattttttcatcgagattaaccagataaatgccttttttccatgcgcgggcgacaggcatgaccagattcacactggataatggagcgaaggcgatacctttgtaatttttattactgagatcttcaaataactgcaattgagattgaaaatcgccttcactaggagaggcaaaaatatcaacgctgacgcccagtgtttttgcttcatcttcaatgccttttttcatatctacccaaaatgggttggagagggttttcaatacgacagcatattcggcggcagcaaaagcgctggtactcaacattaagcccacgagtgtgccgctgaaatatttcagatatttattcataataatgttctcacggtaaggggacaggtaactccgcgatggcggaattacctttttcttatttcagcgcgcctggactgaagaaatcaacaattgcgccggttttttgcatattaatattagcttgttcaatgttgagctgggcgacagagacaaaaaaagcgtccagcaaagttagttgtaatattcttgcgctggcattacgacctaataacggcgtttccggggctggactgcaaataatataatcggccagtttcgctatcggactatggtagctatgggttatacaaataatctttgccccgttcttttttgccagttctacggccgcttttacatcactggttcgcccggaatgggtcactaccagcacaacatctccttcctgtaacaagctagcggacatcatcatgatgtgagcatcaggataggcctgacagcgtacgccaatgcgcaagaacttgtgctgtacatcagcacagatagcattacttcctccggcaccgtacaaatcccgctgtctggcctgatagaaaaagcgggcggcacggtggatctcatcaacgttgacgatgctctgaccttccataatggtgcgtaaagtgatgttaaataccttattcaccacatcctgcggcgcttcatcaaaagccaactcggaaggcaatacctgttcactctgagaaaaataatcttccagcgcactgcgtaagttacgaaagccgctaaaccccagcagcttacttaccttaactatcatcgcttcagataccgccagagcttctgcgacatctttaattgcgggtgcacaactcaggttaccgggtttgagtaaccactccacgatgcggctttcattttctgtcattccttcctgcttcattcgcaggtaaggcgctaaccctataccgttcggaagcgcactatcaaactcactctggctcatcacgttctcttgtccttgaattgaagacgccactatatcaccacagcaagaacagaaaagatgctggcgacttcacaaaaaaataaaatttataaagtttattttattgtgaacaatggcgagtggcttaaaattttatttcatttaattagtttaaaaacatgatgttatttgtttttctggttttttagatgatagatgttgctggatggtgagtgtctttaacgctattgcgctgtcagatgtaactctgtaaaacagatcaggaaggcgtaattcatcgattttgggtgtttttaattcattaacatcacaaatgttttttgattgtgaagttttgcacggacggggaagatgaatgaaaaagattgcatttggctgtgatcatgtcggtttcattttaaaacatgaaatagtggcacatttagttgagcgtggcgttgaagtgattgataaaggaacctggagcagtgagcgtactgattatccacattacgccagtcaagtcgcactggctgttgctggcggagaggttgatggcgggattttgatttgtggtactggcgtcggtattagcatagcggcgaacaagtttgccggaattcgcgcggtcgtctgtagcgaaccttattccgcgcaacttagccggcagcataacgacaccaacgtgctggcttttggtagtcgagtggttggcctcgaactggcaaaaatgattgtggatgcgtggctgggcgcacagtacgaaggcggtcgtcatcaacaacgcgtggaggcgattacggcaatagagcagcggagaaattgagattcatccactacttgcatggatgagtaatgattaatgtggatagagtttctttttgaggttggctaatgaaacgctttccgctatttcttttattcaccctgctcacgctgtccaccgttccggcccaggccgatattatcgacgacaccattggcaatattcagcaggcgattaatgacgcttataaccctgaccgtgggcgagactatgaagatagccgcgacgacggctggcagcgtgaagtgagcgacgatcggcgcagacaatatgacgaccgccgccgccagtttgaagatcgccgcaggcagctggacgatcgccagcgccagcttgatcaggagcgtcggcaactggaggatgaagagcggagaatggaagatgagtatgggcgatgaggttgggtatggagcaggcatcgcccctcaccccaatggggagagggagaaaacgagcgcaatattcaatatcgagcacaatcggtcccctcgcccctctggggagagggttagggtgagggggccagcgcgcacattccctctcatcacgccaccccaatctccatcccatcaaaccccacctcaaacccactcggtagtgcgttttccatcagccacgcatcaaactggtggctgatatgggtcagaatcacccgtgggctgcggataacctgattcagcgcaagcacggtatttaaatcacagtgattacgcggtgcatccgcgcgcggcgggtgactgcaatccatcaccattacctgcggctgattattgcgtaaaaatttcagcgttttttccggcaagcctgcggtgtcagacagccacgccacccggctgtgtgccgtttccagcagataaccgaaggtcagtttactgtggttgagcggcaggggcgtgacctgtaacccctgcaaatcaaacaccacaaacggttccaccgtgtggctgaaatcaagcaggcccggatgtttaaacagatcgtcgcagccctgttcatccggcgggccgtaaaccgggatcggatcgccaacgccccagcgcagcggaaacagcccctggacgtgatccatatgataatgcgtcagcaaaaactgctggaagcttccggggctccagcgatcggcgagatcgtgcagcccggcgtcgatcagggtgattgcgtcgttaaacttcactacgccgctgcacggttggcggcgatactgcgggctgcgccgcgctctggcgcaggccgcacactcgcagccccatgccggaacgccctgtgcgccgccggtgccggtgagcgtgagggtcaggctcatgttacagcgccttggtgaagcggaagtggctctgctcgtagccttcgcgcagatagaaacggtgcgcgtcgtggcgcttcacgttggtgctaagttcggtcatttcggccccggcctggcgggcttcttcttctgcccacgccagtaacttactgccgacgttcagaccgcgcgcctgcggcattaccaccaactcctgaatttcgccgatccagttgacatgatgcagatgaaactgcaaatgcaggccgatcatgccgacaacttcgccatcaagcagcgccagatggtagcgcatgtttgggtcgcgcagattggcgttaaaacccacgcgaaacgcgtggtggtcaaactccgcctgttttagctcacaaatcagcgcgtaaaccgcgtcggtgtcgtactgcgtggccgggcgaagctcacaagcaggcatggtgtttctccttctgatggatcagcgtcagcagcgtgtcgacgctctggcgcaggctgccgtcattgttgagcgtatggcaatcctgtggagtatagcgggcggcgcgcgccaggcgggcgttaatttcactggcgttttcacggccacggttttccaggcgctggcggaggatctccgggctaacctgtaaacagacgggcagcagcgcgctttgatagcgcgcccgcgcctgcggcagatgggcgcgactgccgttgaccagcacgtcgaatccggcgtgcagccagagatcaatctcgacgccgacgccataatacagaccgttagcgtgccagcttaaggccaacagattttgccccgcgcgggtaaaaaactcctgctcgctcagggcgatatggttttcacttccggcgctggcatcgcgcgtgatgtagcgatgcgccaccagtaactgagtttgttcccgcaggcggagttccgccagcaggctgtctttcccggagccggacggccccattaaccaaatcagttttcccatcatcagaacacccttttaccctgacgccagacgtggtcgatatgaatatgattgtccttgcgatgcgccagcaccaggtcggcgcgtttgccctcgccaatcaccccgcgatcctggagattaagcgcctgcgctggatttttagtcaccagcttcaccgcctgcggcagcgtaaagcggttgctctggtcatcggcgacgcgaaatgccgcatcgagcaggctggcggggtagtagtcggaagagaggatatccagcaggccaagctgcgccagttcactggccgccacgttgccggagtggctgccgccgcgcacaatattcggcgcgcccatcagcacgttcatgccatgcttgcggctggcttccgccgcttcgaacgtggtgggaaattcggcgatcacgctgccaagctggtgagattcagcaacgtgggcgtgggtggcgtcatcgtggctggcaagcgcaatttttcgcgcgcggcacagggcggcgatggattcgcgattcggctggctccagcgtgcggcgagcgccagttgctcttcttcgtactgctgcatctgcgcatcagtgagggagtatttgccctgataatattcgcgatacttctcgcggttggcgaactggcgctggcccgggctgtggtccatcaggctcaccagcgtcaccggctcgcgctgcaccagtttttcaaacagcggcagcgtggtgtgatgcggcagttcgcagcgcagatgcagacggtgctcggcgcggttgacgccgcgtttctgcgtctcttcgatggcgttgatcatcttctccagattctccagccgatcgccgccgtcgcgcacgtcgccaattgccacggcatccagtacggtggtgatgccgctcgccaccatcagcgcgtcgtggctgctcatcgcgctgtgggcaggccagtcaactttcgggcgcggggtgaagaatttatccagattatcggtatgcagctcaatcagccccggcagcagccagccgccttcgccgtccatcgcctccggcaggcggctctggctttcggcaaaggcgcggatttcgccgttctgcacctccaggctaccgcttaccacctcgttttccagcaccagcttaacgttattgataatcatgaagaggctcccattgggtgttagctcaactagaggctcccattgggtgcaggcggtcggcgacgtcattacgtacagcttcgtcatggaagatgcctacgatggctgcgccacgggttttggcttcgcgaatcagttccaccaccgcggcgctgtttttggcgtccaggctggcggtaggttcgtcaagcagcagaatggggtagtcgacgataaagccgcgggcgatgttgacgcgctgctgttcgccaccggaaaatgtgcttggtgccaggtgccacaggcgttccggcacgttcaggcgggtgagaagacgcgcggctttagcggcgcaggcttcacgcggaacgccggtatcgagcagcggctgcatcaccacttccagtgcactgatacgcgggatgacgcgcagaaactggctcacccagccgacggtggttttgcggatttccaccactttgcgcgctggcgcggtgaccaggtctacccactcgtcaccgtgtttgatctggatttgaccttcgtcgggcagatagttggcgtacaggctgcgtagcagagtacttttgccgctgccggaatggccgtggagcaccacgcattcgcccgcgttgacggtgaggctggcgcgattgaggacgggcaggcgcacgccgttttgctggtgcaggatgaaggttttactgacgttttgtacgttaatcatttttcgcctcgtggttcgggtgtcggatgcgacgctgacgcgtcttatccgacctacggggagcgcatttgtaggccggataaggcgtttacgccgcatccggcaccggctcaattctgcaaaacgctactcaccagcagctgtgtatacggatgatgcgggtcgtcgagcacgcggtcggttaacccactctccaccacttgcccctgcttcatcaccagcaaacggtccgccagcaggcgggcgacgcctaaatcatgggtgacaatcaccaccgcgaggttcagctccaccaccaggccgcgcagcaggtcgagcaggcgggcctgcacgctcacatccagcccgccggtcggttcatccataaacaccagcttcggatgcgtcaccaggttgcgggcaatctgcaaacgctgctgcataccgccggaaaaggtggtcggcaggtcgtcgatccggttggcgggaatctccacctcttccagccacttctgcgcggtggcacgaatatcgccgtaatgacgtgccccggtcgccatcagccgctcgccgatattgccgcctgcgctcacctggcggcgcaggccgtcgagtggatgctgatgcaccacgccccattcggtacgcagcaggcgacggcggtcggcctcgctcattgcatacaggctacggttctcgtagtgaatttccccctgctgcggcgtcaggcgcgcggagatgctcttcagcagcgtggtcttcccggagccggattccccgacaatgcccagcacttcccccggccataaatcaaaagagacatcgctaaagcctttgcccggcgcgtaaaggtgggtcaggttattgacgctaagtaacggttgattcattggttttttgcctcgctctgttggcggcaataatcggtatcggagcagacaaacatgcggtttccggcgtcatccagcaccacttcatcaagatagctgtgggtgcttccgcagatggcgcatggctcatcccactgctgaacggtgaacgggtgatcgtcgaaatcgagactttccacgcgggtaaacggcggcaccgcatagatgcgcttctcgcgccccgcgccgaacagttgcagggcgggcatcatgtccatttttgggttatcgaatttcgggatcgggctcgggtccatcacgtagcgcccatttaccttcaccggataggcgtaggtggtggcgatatgaccgaagcgggcgatatcttcatacagtttcacctgcatcacgccgtactcttccagcgcgtgcatggtgcgggtttccgtttcgcgcggctcgataaagcgcagcggctcggggattggcacctggaagataattatctgatcttcggtcagcggcgtttcggggatgcggtgacgcgtctggataaccgtcgcatcgtccgtacgttccgtggtgtttaccccggtcacgcgcttgaagaagttgcgaatgctcacggcgttggtggtgtcatccgcgccctggtcaatcaccttcagcacgtcgctttcgccaatcacgctggcggtaagctgaatgccgccggttccccagccgtacggcatcggcatctcgcgcccgccaaacggcacctgataaccggggatcgccaccgcttttaagatggcgcggcggatcatgcgtttggtctgctcgtcgaggtaggcaaagttgtagccgctcagattagccatggttctgctcctgttgcagacgtttgagtagctccagttcggcctggaaatcgacgtagtgggggagtttgaggtgactgacaaagcctgcggcttcgacgttgtcggcatgtgccagcacgaactcttcatcctgcgccgggcctgtcgcgtgctcgccgtactccggggcttgcagagcgcggtcgaccagcgccatcgccatcgctttgcgctcgctcatgccgaacaccagcccgtagccgcgcgtgaagtgcggcggctcacccggcgggtcgataaaaccgttaaccatttcacactcagtcatcagcagttcgccgacgttcaccgcaaatcccagctcttccggcacaatgctcacgtcgatatagccgctgcggatctcgcctgcgaacgggtgattgcgcccgtaaccgcgttgggtggagtaggccagcgccagcaaatagccttcgtcgccgcgcatcaactgctgcaaacgggaggagcgactgcaggggtaaaccggcggcgtgcgggtgatgtcatccggctgtgcgccgctatcctcttcaaacttcgccagcccctgacgcgccagcaggctgaaaacgtgcgggctcggctgctgttcgctgtcggcggtggtcagcgtcggcgcttcgccgtttgccagcagggtaaaatcgagcaggcgatgggtgtagtcgtaggttgggccaagcagctggccgccgggaatgtctttataaacggcggagatacggcgttcgagacgcatcccggtggtgtcgagcggctcgcttaccgccagcttcgccaacgtggtgcggtaggcgcgcagcaggaaaatcgcttcaacgttatcgccgctggcctgtttcagcgccagcgccgccagttcgcggtcggcaatgccgccttcggtcatcacgcgatctaccgcgaggttaagctgctgttcaatctgggcgacgctcagttcgggcaaatcggtatcgcctcggcgtcggctctcttgcagggcgtgggcggcgtcgatcgccttctcgccccctttcacggcaacgtacatcagcacacctccacatgagtggttcgcggaatagccagcaggcgctcgccacaggtcaggatcaggtcgatgccgagcgggaacggatgcgggcgctcggtgagttcgtgcagaatgcactccggcagctgcggagcgatcattcgttcttcggcaatacccgcaccagtaaggcgcaacatgcgtccgccgctcaggctggcgacctgtaaaatcagcgtcgcacccgcttccggcgcaacggcggtgccggtggaaagggcgttgagctgttcgctggaaatcgcctcatccgtcaccgcgaaggtcgcctgttccggctggctgaccagcggcgcgttggtatgaaaacgcaggctctggttgacgatatcgttatttaatggggtagaaagccacaccggcgtgtcgttatcggccagcgtcagcagcacgctggtggtggcgatattcagcggttgccagccgcgtttgagctgatgcagggcgacaatcacgcccggctcgctcatggcctttaacaggcgacgaaaactgtgctgggcatcctgcacgggaagcataaaagcggtttccagggtcatgcgttgtctccgcgaaccatcgtaaagaagtcgacccggctggcgttcacttcggcctggcgtgcggcaatgcgtgccatacggtcagcgtccagcggggcaataagggtttcacttaagttttgaaagtggcgagattgctgcatcagcgcgtcaatcagcgcgcagcgttcggcgtgctgtttatcacgcccctgcacccagctgtagccgagcgtgccgtcagtcaggcgcacggcggcgcgggtcagcgtggcgtcgccggcaaaaaaacgttcgccggtgccgcccatccgcgcctgaatctgtaccaggccagtttcagcggcgcggatcacctcatagtcggcggtgatgtttagcgcgttcaggcgtgctgccagttcagccggttggctgtgcgccagcacggacatccagtgctggcgggtcgcggtatctgcgtgcattcagtgctccatagtgaattcaatcatgtcggcgcgcgtcaggctgacggagtactccgccgggctgctttcaccgtcacggtggttaagggtgcgcacgcacagcagcgggctcatattcgggatttcaagacgctggcactctttggcctgggcgcggcgggcgctgatccgcgtctggctgcggcgcagcgcaattccggtttgctcgcgcagaaaatcgtgcaggctgccgctgtcgaagcgttgcagcgtcggccagagggtgaggtccgcgaagtagtggtcgattaaacagagcgcgacgccgttgacacgacgcagggtgcgcaggtggatgacgttctccccctcggtaatccccagtgcgtcagcgacgtggccggacgcggggcgcaatacgctaagcagtttttcgctggtgggatggctgccctgatccagcagattctggctaaaacgcgcctgggcgttgagcgggtaatcgaacgggcgcatcagcaccagcacgccgacgccctgacggcgctgtacccagcctttttccaccagttggtcgatggcgcggcgcagggtgtggcgattcacctcaaagcgcgctgccagttgctgctcggcgggaagatagtcgccgcagcggtagtgttgacgaagctcctgctcaagttttgcggctatctcttgatagcgtgttgggtagctggtcggatgtgtagacaagtgcatagatatcaatgcctcgcttatcagataaagtgcttacgcaaccgttgagagaggaaatccagcaggctgaccgtgacgatgataagcaccatcagggcgcaggtttgttggaactggaaaccgcgaatcgcttcccacagggtgacgccgatcccgcctgcgccgaccatgccgacgacggtcgccgagcggacgttggattcgaagcgatagagggagtaggagatcagcagtggcatcacctgtggcagcacgccgtagaggatctcttcgagcttgttggcaccggtggcgcgaatgccttccaccgggccgggctcaatcgcttccaccgcttcggaaagcagcttggagagcacgccggtggtgtggataaacagcgccagcacgccagcacgccagcgaacgggccgaggccgacggcgaccacgaacagcatggcgaagaccatttcgttaatggcgcggcaggcgtccatcaggcggcgaacgggctggtaaacccaccacggcaccaggttttcggcgctcatcaggccaaaggggatggagagaaccaccgccagcgcggtgccccagacggcgatttgcagcgtgacggccatttcggtgaggtaatcctgccactggctgaaatcgggcgggaagaagtcggcggcgaacgtcgccatgttgccgccgtctttgatcagcgtaagcggggccatttccgcgccctgccacgagacgaccaacacggcgagtacaacggcccagctcagaagcgagaaccagctgcgcttgggtggggcgatggtgatggtttgcatgtttggctccggtctgtaggccggataaggtgcttgcaccgcatccggcatcaacgcctgcacattgtcggatgcgacgccggggcgtcttatccgacctacgatttactgcaccgctttactcacgctactcatcgcgcttagcgcgttgttcaggcggtccaggtcatccagctgcgcctgaatctcggtggtttttgccagcttgtcctgctcattcagtcctttattgcttttcacgccctgcatctctttaaacagcgcgagctggcgaatcggcaccagttgcaggtcgctggaagcgcggaatggcgcccagcccaggcgttccagcaccgctttttcttccggcgttttgccgtagttcataaagaagtcgtagatcttgtctttggtggtttcggaaagattcttgcgccagacgatcggatcgcctgggatcagcgggctcttccagatcaccttcagttctttcagcttctctggcgcggaggttttcagcttgtcgaggttttcggtgttgttggtggcaacatccacctgcttgttggcgacggccagcgcgttggtttcatgcccggcgttgacggtgcgcttgaagtcgctggcggagatattgtttttggcgaagacgtagtagccggggacgaggaagccagaggtggagttaggatcgccattgccaaaggtgagatctttccgcttcgccagcagatcgttcaggttgttgatcggactgtctttgttgacgatcaacacgctccagtaacccgggcttccatccgccgcgaccgtctgggcgaagacctggccattggcgcgatccaccgcttccatcgcgctcagattgccgtaccaggcgatatccactttattgaagcgcatcccctggataatgcccgcgtagtccggggcaaagaaggcgttgaccttcacgcccagcttcttctccatatcctgcaagaacggcgtccattgcggtttcaggttttgctgactttccgtactaataatgccgaaattcaacgccttttcctgctcttcggcgtgcgccgggcttaacagggtgctgaggctgaacatgctggtgaaggccaggctggcaattatcttagcgttcattcgttttcctcaatgatggggatgtcaggcagctttcgcgttctcttcgacgcggttaatgctgcggtagagatggtcaaaacgttcgttatcaaactgttggctgctgccgtcgtagaagacgtgcccctggcgcagggcgacgatgcgttcgcagtagcgcagggcgtaatccacctgatgcagcgtgacgaccacggtgatgccgtcgttctggttgatgtcgcgcagggtgtccatcacgatgcgcgcactttctgggtccaggctggcgatgggttcatcggccagaatcactttcgcctgctgcatcagcgcacgggcaatcgccacacgttgctgctggccgccggagagggtggaaacgcgctgatgggcaaaatgcaccatgccaacgcgggtcagcgcctgtaacgcgcgctgtttctgctcgccggtgaaccagctaaaacaggtgcgccagaacggcgtgctgccgagcgcgccaatcagcacgttctccagtacgctcaggcggttcaccaggttgaattgttggaatatgtagccggtatgggcgcggcttttgcggatatcgcgggccaggcggccttcgcgctggactgtgcggcccagcagctcgatatggctaccgacagatttatcgccggtaatcaaaccgcttaagtgacgtaaaagggtggattttccggaaccgctcggcccaagcagagccaccatttcaccgtgatgaatgttcagatcaaccgcatgcagcgcctgatgctgattgaaggttttggcgagcttctcgacacggataatcgtttgcatgatgcagcctccctaaaaaagtggctccatcgtggcggattattgtgacgatttggttaattaaaagtgactaacagatgaagagttaacgggaattcgatgacagtgcgggagggcgggcctcccggcgggttattgcgttggttgttgtttgacgacattaatcatccacggtacgccaaatttatcggtgactttgccaaagccatgcgcccagaaagtttcctgccaggccatttcgatttttccgttagcggcaagattgtcaaaccagcgttttccttcttcgacctgttggctatcgagcaccagcgtaaagccggagtagctggcttttccactcggcatggcatcgctcatcatgatgtcgcttccggcaatgcgcacattggcgtgggcgatggcggtatcgggaaattgcattccggaagggcagttctcggcgctgtcctgcgcactttttggcatttcgccgaagctgattttatagagcagttccgcgcccaacgtacgttgataataggcaatcgcgtcggaacagttaccggcaaaagagaggtagggacttaacggcatgatggtgacctcagttaagagaagccagttaagtgtagttcgaaatttatacagatgagaggcggcctgataagacgcgcgagcgtcgcatcaggcagtcggcactgttgccggatgcggcgtaaacgccttatccggcctacggagggtgcgggaatttgtaggcctgataagacgcgcaagcgtcgcatcaggcagtcggcaccattgccggatgcggcgtaaacgccttatccggcctacggagggtgcgggaatttgtaggcctgataagacgcgcaagcgtcgcatcaggcagtcggcaccgttgccggatgcggcgtaaacgccttatccggcctacggatggtgcgggaatttgtaggcctgataagacgcgcaagcgtcgcatcaggcagttggcactgttgccggatgcggcgtaaacgccttatccggcctacggagggtgcgggaatttgtaggcctgataagacgcgcaagcgtcgcatcaggcagtcggcaccgttgccggatgcggcgtaaacgccttatccggcctacggagggtgcgggaatttgtaggcctgataagacgcgcaagcgtcgcatcaggcatctggcaccgttgccggatgcggcgcgagcgccttatccggcttaccgatcacaatacaatcagttctttttcacaaactcagatttcagtttcatcggaccaaaaccgtcgattttgcaatcgatgttatggtcgccttcaaccaggcggatgtttttcactttggtgccaattttcagcatgctagagctacctttcaccttcagatctttaatgatggtaacgctgtcgccgtcagccagcagattgccgttagcatctttaacgatcagctcgtcgctttcctgtgcaggttctgcgtcgttccattcgtaggcacattccgggcagatgtacatgccgttatcttcgtaggtgtattcggagttgcattttgggcagtgtggtaaactcatgtggatttcctcaaaagtcagcagggcaaaagcgccaaaaaacggcagattgccgaaaaaggccgcaattatacacaaaatccctgagtttgtcgggggtactgctgattttagacgacgatcgttttcatttgaaaggaaacgcaaaaagaaaataatctttttgcctctatttattatttaagataatgttaatgctctacttgttctttttttaattcacatgatatttttatctttctgacgttttaaacgtatcagaagacgttatttattctgataaaaaacaacacactaaatataaaattatttcttgcagtaattataaaagccgaaaacagaactcaaaaacaatctggctaaataaaataacaaaatttgctttaaggaagaattttctatgtacacacagaccctgtatgagttaagtcaggaggctgaacgcctgttacagctttctcgccaacagttgcagttactggaaaaaatgcctctctctgtacccggagacgacgcgccacaactggctttaccctggagtcagcctaatatcgccgaacgtcacgcgatgctgaataatgagttgcgtaaaatttcccgactggaaatggtgcttgcaattgtcggtaccatgaaagcagggaaaagtaccaccattaatgccattgttggtacggaggttctgcctaatcgtaatcgcccaatgactgcgctgccgacgcttattcgccatacgcccgggcaaaaggaaccggtactgcattttagtcatgtcgcgccaatcgattgtttaattcaacaattacaacagcgcctgcgtgattgcgatattaagcatctgaccgatgtgctggaaatagataaagatatgcgtgcgcttatgcagcggatcgaaaatggcgtcgctttcgaaaaatattatctgggtgcccagcctatttttcattgtctgaaaagtttgaatgatttagtgcgactggcgaaggcgctggacgtcgattttcctttttctgcttacgccgccattgagcatattcccgtgattgaagtggagtttgtccatctagcggggctggagagttatcccggtcagttgacgttactggatacccccgggccaaatgaagccgggcaaccgcatctgcaaaaaatgcttaaccagcagctggcacgcgccagcgcggtactggcggtgctggattatacgcaactgaaaagcatctccgatgaagaggtccgtgaggcgattttggcggtggggcaaagcgtgccgctgtacgtgctggtcaataagttcgatcaacaggatcgtaacagtgacgacgccgaccaggtgcgggcactgatttccgggacgctgatgaaaggctgtattacgccacagcagatatttccggtgagcagcatgtggggctacctggcgaatcgggcgcgctatgagttagccaacaacggtaagttaccaccgccagagcaacaacgctgggtggaagattttgcccatgccgcgcttggcaggcgctggcgtcatgccgatctggcggacctcgaacatattcgtcatgctgccgatcagttgtgggaagatagcctgttcgcccagccaattcaggcgttgcttcatgccgcttacgctaacgccagcttgtatgctctgcgatctgccgcgcataaactgttgaattacgcgcagcaggcgcgggaatacctggattttcgtgcgcacgggttaaacgtcgcttgtgaacaattgcggcaaaatatccaccagatcgaagaaagtttgcagctattgcaactcaatcaggcgcaggtgagcggcgagattaaacatgaaatcgagctggccctgacctccgccaaccactttctgcgtcaacagcaagatgcgctgaaggtgcagttagccgccttgtttcaggatgatagcgagccgttaagcgagattcgtacccgctgtgagacactgttacagacggcgcagaacaccatcagtcgcgactttacgctgcgttttgccgagcttgaatccaccctttgccgggtgttaaccgatgttattcgccccattgagcaacaagtcaaaatggaattgagcgagagtgggtttcgtcctgggtttcattttcctgtttttcacggcgtagttccccacttcaacactcgccagctgttcagtgaagtcattagccgccaggaagcaacggacgagcagagcacgcgtttaggcgttgtgcgtgagacttttagccgctggttgaatcagcccgactggggacggggaaatgagaaaagtccgacagaaacggttgattacagtgtgttgcaacgagcattaagcgcagaagtcgatctctattgccaacaaatggctaaagttctggcagagcaggtcgatgaatctgttacggcaggcatgaatacttttttcgctgagttcgctagttgtttgacggaattacagacgcgtttacgcgaaagtctggctctgcgtcaacaaaatgaaagcgtggtcaggctgatgcagcagcaattgcagcagactgtgatgactcacggctggatttacaccgacgcccagctgttacgcgatgatattcaaacacttttcacggcagaacgatattgaccaagacgttacttgacggccccggtcgcgtgctggagagcgtttatccccgctttttagtggatctggcgcagggtgatgatgcccgccttccacaagcccatcagcagcagtttcgtgaacgactgatgcaggaacttcttagccgtgtgcagcttcagacatggacgaacggcggcatgttaaatgcgccgcttagcctgcgtctgacattggtggaaaaactggcgagcatgctggatcccggtcatctggcactgacgcagatcgcgcagcatctggcgctgctgcaaaaaatggatcaccgccagcactctgctttcccggagctcccccagcaaattgccgccttgtatgagtggtttagtgcccgttgtcgctggaaggaaaaggcgttaacgcaacgaggcctactggtgcaggcaggtgatcagagcgagcaaatttttacccgctggcgtgctggggcgtataacgcctggagcttgcctgggcgctgttttatcgttctggaggagttgcgctggggggcatttggcgatgcctgccgtctgggaagcccgcaagcggtggcgttgttgctgggtgatttgctcgagaaagcgacacaacatctggcagagagtatcaatgcggcaccgaccacgcgtcactattaccatcagtggtttgcctctagcaccgttccgacgggcggggagcatgctgattttttaagttggctgggaaagtggaccacggcagataaacaacccgtttgctggagtgtgacccaacgctggcaaactgtcgcgctggggatgccacgactctgtagtgcgcagcgtctggcgggggcaatgctcgaggaaatcttctctgtaaatttggcgtaaataatcagttacatcaatgagtcctaaacgaaatccatgtgtgaagttgatcacaaatttaaacactggtagggtaaaaaggtcattaactgcccaattcaggcgtcaactggtttgattgtacattccttaaccggagggtgtaagcaaacccgctacgcttgttacagagattgcatcctgcaattcccgctccccttttgcggccgtcgcgctgatttttctggcgtttgcggaaatgggccaactctgcgaggaaagctatgctgaaaaggaaaaaagtaaaaccgattacccttcgtgatgtcaccattattgatgacggtaaactgcgtaaagccattaccgcagcaagtctgggtaatgcaatggaatggttcgattttggtgtttatggttttgttgcttacgcattaggtaaagtttttttcccgggggctgaccccagcgtgcagatggttgctgcacttgccactttctccgttccctttctgattcgaccgcttggcggactcttctttggtatgttgggcgataaatatggtcgccagaagatcctcgctatcactattgtgattatgagcatcagtacgttctgtattggcttaataccgtcctacgacacgattggtatttgggcaccgattctgctgttgatctgtaagatggcacaaggtttcagcgtcggcggtgaatataccggggcgagcatatttgttgcggaatactcccctgaccgtaaacgtggctttatgggcagctggctggacttcggttctattgccgggtttgtgctgggtgcgggcgtggtggtgttaattagcaccattgtcggcgaagcgaacttcctcgattggggctggcgtattccgttctttatcgctctgccgttagggattatcgggctttacctgcgccatgcgctggaagagactccggcgttccagcagcatgtcgataaactggaacagggcgaccgtgaaggtttgcaggatggcccgaaagtcagctttaaagagattgccactaaatactggcgcagcctgttgacatgtattggtctggtaattgccaccaacgtgacttactacatgttgctgacctatatgccgagttatttgagccataacctgcattactccgaagaccacggggtgctgattattatcgccattatgatcggtatgctgtttgtccagccggtgatgggcttgctgagtgaccgttttggccgtcgtccgtttgtgctacttggtagtgttgccctgtttgtgttggcgatcccggcgtttattctgattaacagtaacgtcatcggcctgatttttgccgggttactgatgctggcggtgatccttaactgctttacgggcgttatggcttctaccttgccagcgatgttcccgacgcatatccgttacagcgcgctggcggcggcatttaatattagcgtgctggttgccggtctgacgccaacgctggcggcctggctggtcgaaagcagccagaatctgatgatgcctgcctattacctgatggtagtggcggtggttggtttaatcaccggcgtaaccatgaaagagacggcaaatcgtccgttgaaaggtgcgacaccggcggcgagtgatatacaggaagcgaaggaaattctcgtcgagcattacgataatatcgagcagaaaatcgatgatattgaccacgagattgccgatttgcaggcgaaacgtacccgcctggtgcagcaacatccgcgaattgatgaataagctgaaacggatggcctgatgtgacgctgtcttatcaggccaattgaactcttaaggttcacttaatctctgacgcgcatactctcctccaggttaacggaggagagtgcaatgaaaaaccgtgtttatgaaagtttaactaccgtgttcagcgtgctggtggtcagcagctttctttatatctggtttgccacgtactgatctttcttcagccgtacccaggcccgcgtgccggaagtctcttgccggttttgcaggaaaaactgcccgtgatgcaactgtgtaatgcggctgacaatacttaaccccagaccaatcccgccataacggctgtccatacgtacaaacgctttactcaactccccgcatttactctcatcaatacctggtccttcatcttcaactgccatgaccgctccgtcatcttcttgcagcttaatcataatgttgctgccttgcgggctgtaacgatgggcgttttctaccaggtttcgcaataacatccgcagcagggttgcatcaccctgaacggtgatgtcggcggcgctctctggcaatagcagggtttgctgtcgctggtcgagcatggtactgagttcgtcatagctggggagaatgacatcttccagcagttttacatgttgataattaccggaagaaaaactctgtccggcacgcgccagttgcagcagctgggagacgctctccatcatctgatcaagccgtgccactaacggtgctacatcaatgtgatgcgttttcgccagcagttccagatgcaaacgcacccccgccagtggcgttcgcagttcgtgcgcgacgtcagcggtaaacaacctttcgttatccagcgtgctggtcaggcgactgaccagatcgtttaacgcgctaaccaccgcttcgatttcgagggtggcgctgtgaatggcaatgggcgttaagttgtcggcggtgcgcgcttccagctctttttgcagctccgccagcgggcgggtgatgcggcgtaccgcctgatagcagataaatagcgtcaggctgaccataaagacgccggggacaatcaggctggcgaccgcctcgcggatctcacgcatgatgtggcgatcgttgttgcgattgtcgcgtagcgcctgctcaaacagctgaatctgctcggtactttcatgccatagccagaagacgctgatcagctcaaacaccaacaaaatggccccgatggtcaatatcagccgttggcgcaggcttattggtcggcgcagaaaatgcatcagattcaattagttttcctcattcgcgaccagcatatagccaaagccgcgcacggtgcggatacgggctttgcccactttgtcgcgcagattgtggatatgcacttccagggtgttggtgctgggttcattgtcccagttatagatgtcgttgtagagaatttcccgatgcaccggactgcctgctttgagcattaaccgactcagcagagcatattctttgggcgtcagaatcaactcttcaccgcccatccatacctgacggcgacccatgttcagcgtcagattgccaacaatcagctcactttcgccctgattattatggcgtcgtagcagggcgcggatacgggcatgtaactcttccagcgcaaaaggcttcaccagatagtcgtcggcaccgacatccagcccggcgattttgtcggtcagcgtatcgcgagcggtgaggatcagtaccggcagggtatattttttctgccggatacgggcgagaaaatgcagtccatcttcgtcgggtaaccctaaatccagtaccaccaggctgtaatgacctgcctcaaggctttgttccgccatccgcgcggttgtcacgctatcgcacgcgtagccttcggtttgcgccgccagaatcagtccctgcaataacagcgtatcgtcttcaacaatcagaattttcattcactcactctcctgcaagtttgcagaatatcatccgcagcctggtaatacttcgtctcaacgccagttaatcccaatagcgtggagaataaattgtcttgactatagtgttgcgtttgcgcctgtttttgcaggcagttctggtcaacctgataccgtttttgataatcctcgctcagccacagcagcatcggcacctgtttttggctatccggggcgatggcataaggcagaccgtgcagatagatgccattttcacctaagctttcaccgtggtcagaaagataaaccaggctggtggtaaatttatcctgatgttctttcagcagattaatcgctttatcaacaatatagtcgacgtaaaccagcgtgttgtcgtaagtgttcaccagttgctctttggtacaggtctggatctcattggtgtcgcaggttggggtaaatttcctgaactgaggcggatagcggttgtaataggtcggaccgtggctgccgatggtgtgtaagacaatcacgccatcaccttgcaggttattgatgtactcttcaagcccgtggaacagcacttcgtcatagcattcgccgttgatgcactgatcaggtagattcagcgcggtgacgttctggtgaggcacgcggtcgcaggcacctttacagccgccatcgttgtcattccacagcacgttgatgcccgctcgctgaatgatatccagcacgccttcctggtgctgtgccagctcttctttgtagtgctcacgcggcatatcgctgaacatgcacggtacactaactgccgttgccgtgccgcaagatgcggtattagggaaatagaccacgttatctttcgccagccgcgggttagtttcacgcgggtagccgttgagggagaagttctccgcccggctggtttcgccgacaatcaggatggtcaaatttttacgtttttcgttctgcattaacgggttgcggtgcgcgtcttcaccaattcgcaccagcggcagatttgccagtcgctgatgggagtaccaactccagctggcaacaatgctgttagaggggcttaaggatttcaccagctctttgttattgcggaacaagctggcgtagtctttataaaacagtgcggcgaccagcaaaatcagtagtacagaaaccagaatattggctccacggaaaagaacactgcgcagacggctggtggcaggtttgatttttatccagcaggcaatcagcgcagcaagcacgccgctgaatcccagcgttaataacatttgcggtgtcatcagcgcataactttctgccggagtggtatcaataatattggcaatcatgctgcggtcgatgacgatgccgtaagtcattatgaaatattgtgcagccgcgccaaccagaataaacaggcaggccagtggtcgattaagccataagaaagagcttagtgtcaggacaatattaatcacgctgaaagcgacgaccggcatgctcaagaaaaccagtacgttatgcaggctatccagcggcagcgcctgcaacacctgtttaaaaaaggcaatattcaggcagatagagatataaaaagcggccaacaatagccaggcgagtaaattcaaagagggtctttttagtaggcgcttcaacatcacggtgtttccatcgaacaaagtgcgcatatgctcgcaaagcaaaattaagccaaccttaagttcttaaggttggcttttatgtttgctggattaaggggaattaatctttgcttattggtgcatctaagggatacgggtttttatgtagccggttgtaattcagcgcatacatggcggtgatgaccatcagggtgacaaaactccacataacctctttcgctccggaccccaccacggcccagatgcagtagaggaaggcaatggtagtaactgccagatatgccgggcgtgctttaccaaagtgaccgtgtccgagcagcagtaacgccgcacaggtgtaaagatatggcaccagtgtaaagatgacgctgacggaagaaaccagaccgaactctttggtcgcgtttggactaatgctgctgagctggaagatggtcatcaaaataccgacgataatcagccccgccactggcgtacccgctttatttacacgggcaaaaatcggtgggaacagtccgtcatcggcagcggctttcgccgtttgacccgccagcaacgtccagccgcccagactacctaagcaacccgcagctgcgcagaaggaaacaatggccccggcggtgtcacccaacgccatccgtgcggcatcaccgaatgggctagcagaaacgcgcagtgcggcattagggatcatccccataatcgcggtggtagaaagtacatagcaaacggcggcaatcaataccccaccaatggtggcgatagggacattgcgtttcgggtttttcaccacacctgcggcaacggaggcactttccacaccgatgaagctccacagcgtaacgttaagggtactttgaattgcaccgaaggtgcccaggccgctgacgttccatgccgccatataggtttcaccacggaaccagaaccagccaaatacggcaatcccgacgatggggatcagcgccagcacggtggcaactgcctgcacacgggtgatcattttcggaccgacaatgttcagcaggacgaagatccacagcaccacgacgcaggtgatggttaataccaatggatctttcagaatcgggaagaagtaacttaaatatcctacgccaatgaccaccatggcgatattgccgatccagcaggccagccagtagaggacgttggtttgataaccgagaaacgggccaaagcagcggcgggcgtaagcgtaagaaccaccaggacttgggtcgaggaagctcattttggcgtataccatgctgagccccagtgcaccgataatcgtcaccaaccatccataaatggcaatcccgccagtagaggccaggtttgcaggtaacagaaaaacaccactccccataatattcccgctcaccatcagggtgacggggattaagcccactttgtgagcatcagcatcgctagacataattaaactcctgcgaaggcgagcttcgtgacaataaattacgtcatatcatacgcctgcattcgatagttgaattattatcgaccgggttatcgctgatgccgttattaatatagctcttcgttaaggttaaaaatcaggcgacagtgcgttctctgtgctgactaacataatgcagcggcgtcataccgtagaagtctttaaagacagaaataaagtagctcgtactgttgtagccgcaggactgacttacctgagagatatttttaccgtccatcattaattcatttacggcataacgcatgcggcaggtggtgattatttggctataactggtgttttcgcttttcaactttttctttaacagacttgggctaagacataaacaactggctaccatactaagattccagtctttgtgaatatcgctttcaataatttgataaacgctgtcacttacacaattacgtaacatatacatcattaaactaacgaattttttactgtcgagaaaacgggatagcaccgtgaataataatgcgcgtgttcgttccttttcactctcagtttctgcgggcatcatgctgtgttgcgcggcaacgcgaaagacgtctggcgtcaggcatggcagggtgagtatgggcgtagcgctacgttgccatactggtatttggctgagatctttattcagaaaccggaggtaatctttgatgatgtcgtgactaatatgagcaaccaaagtgttgttaagagaggagacgtcgataatattattttcacaatttaataacgccatatggttagctttaaggctaataggttctttcccattcacccttatccagacatctttttcagtcaataaaacaatacaaggttggtcgctgcaaatcctcatacatgtactcctgagtgcgaataaaagaccagttctcgctaaagcaaagcgataccgggaaatggttatataattgtatgatgaatataaacatgcataaaaataacgagttttactaatagtacaaatttttatagtaatttctcatgtacatatttttttacaggataaataacaggcaaaaaaaagcgcggggtggggccgcgcaaaaagtatgacatttttgtttgcagcaatttttatgaaaacgttgccatactcaaaaggcctaaggccaggcggcgtaatgttatttaaacaattacgccttcagcggaatagtggttacgctttcacgcacataacgtggtaaataccgtcaataatttcagtcccttcagtttcgtgttcaaatccagggaaatggtggtcccaggattgcaggctgcgtaaataacttacttgcggactgtttttatcgccgaagttttcaccagacagcagcatcgggattcctggcggatacgggataacactgtttgccgcgatgcgtcctggcagattttcaatggataccagttcgacattgttgtcgacaatcgcgttgtacgcttcacgcggggtgacttccgccaccggcaggccggaataggcttcgttcaaccgtgcgccagggttgttttctttcagccaggcaaacatggtgtcacccagatcgtgaatccccatgttcgcgtaagtgtcaggatattgttcaacaagttccggcatcacctgcgccagcggtgtgttggcgtcatagtggcgtttgaaggagcaaagggtgttaaccagagttccccatttcccacgggttacgcccatagagaacaggaacataatttggaagtcagtggtgcgggtaggtacaatgccgtggcgaccaagccaggcagtgaccagcgccgccggaacaccggtttcttccagttcaccatcttcacccattcccggagcaaggatgctgactttaatcgggtcgagcatactccagttatccggaatatctttgaagccgtgccagctttcgcccggatgcattacccagcagtcctgaacggtggtcagcagtttggttggtgcgtcagcaaagtcataggttttgccggtttgtgggtcggtgacgacttctttgttccacggtttgaagaaccagctaccgtcagcggtgaactctttatatagccgcgccatcgcctgacggaaatcaaccgcttcgtcaatcacttcctgtgtcagactcaggccgctgttgccgtccatcatgctcaccgccacgtcgttggatgcgcagatggcatacagcggggaggtggtggcatgcatcatgtaggcctggttgaagcgggagaagttaatcgccccacgaccttcacgtacatgaatataagaagcctgactcagcgcattcagcagtttgtgggtggagtgggtggcgaaaacggtaggaccgttgtgatcgccaggttcgccgcgcatggcatagtgatcggcatagatcgggttgaaacgtgcatagccgtaccaggcttcgtcaaagtgcagacgatcggaggttttttccagcagatcctgcgcttctttagcgttataacacacgccgtcataggtgcagttggtcaccacgcagtaagacggtttttgcccggctttgtctttggtcagcgggctttcactgattttcttctgcaaggtttcaggttgcatttcctgcggatagattggcccgataatgccgtagcggttgcggcttggcaccatatagaccggtttcgcgcctgtcagcatcaaaccttgttcgatggatttatggcagttacggtcaacgaccacgacatcgttatcggtcatgcaagcctgcatgatggtgcggttagagccggaagtaccgacgactacgctccaggagcgatcggcaccaaatacgcgtgcggcatatttttcgctttcgccaaatgcgccagtatggtcaagcaaagaaccgagggaagttcgttcgatgcccatgtcggtgcggaacagattttcaccatagtagtcatggtagaaacgtccggcgggtgttttggtaaaaccaacgccgccctggtggcctggcgctgcccaggaatattcatggatgtcactatatttcatcagcgcgctgaacagtggcggcaacagctgctggcggtagcgggtcatcgcggcaacggcgcgtccggcgataaagtcggcggtatcttccagaatccaggcgaattcatcgacaagctccagcaggtcgcgatccattgcggcgagggctttttcccgatcgcccaacaggaagaccggcacgttttgttggcgctcatgaagcttaccgatcaattgtctgacgttttgatgttcgtccggatgttccatttgatagctgaacatcaggcagtcaatggcttcgttactagagagaatggcaaaaccatcatcaaaggaggtggatttaatcacggtaacattttgctggcttaaagcatctgccagacgctcaacggcgttaccgacccaggtgtcttgatggagaaactcgctttcaacaattaatactttcatcattgcttacccggttatgaaggaatcttcgttgcgggcaagtatcttccggccttttcgggctgtaaagcgcgtgaaaaacaaacatttttgaaatatttagttttataaacaatacgttatgtgattattttaaattattttcactgcttattatcgacggctaaactatttttttggctgatactgatatcgtctttagccgggaaacgtctggcggcgctgttggctaagtttgcggtattgttgcgggctcatgccgacatatttgccgaacgtgctgtaaaaacgactactactacgaaagcctgccgtcagggcaatatcgagaatacttttatcggtatcgctcagtaacgcgcgaacgtggttgatgcgcatcgcggtaatgtactgtttcatcgtcaattgcatgacccgctggaatatccccattgcatagttggcgttaagtttgacgtgctcagccacatcgttgatggtcagcgcctgatcatagttttcggcaataaagcccagcatctggctaacataaaattgcgcatggcggctgacgctgtttttgtgtgtgcggctggttttattgaccagaatcggttcccagccagagaggctaaatcgcttgagcatcaggccaatttcatcaatggcgagctggcgaatttgctcgttcggactgtttaattcctgctgccagcggcgcacttcaaacgggctaagttgctgtgtggccagacttttgatcaccatgccgtgagtgacgtggttaatcaggtctttatccagcggccaggagagaaacagatgcatcggcagattaaaaatcgccatgctctgacaggttccggtatctgttagttggtgcggtgtacaggcccagaacagcgtgatatgaccctgattgatattcactttttcattgttgatcaggtattccacatcgccatcgaaaggcacattcacttcgacctgaccatgccagtggctggtgggcatgatatgcggtgcgcgaaactcaatctccatccgctggtattcgctatacaggctcagcgggctgcgggtctgtttttcgtcgctgctgcacataaacgtatctgtattcatggatggctctctttcctggaatatcagaattatggcaggagtgagggaggatgactgcgagtgggagcacggttttcaccctcttcccagaggggcgaggggactctccgagtatcatgaggccgaaaactctgcttttcaggtaatttattcccataaactcagatttactgctgcttcacgcaggatctgagtttatgggaatgctcaacctggaagccggaggttttctgcagattcgcctgccatgatgaagttattcaagcaagccaggagatctgcatgatgtctgcacccaaaattacatttatcggcgctggtagcacgattttcgttaaaaatattcttggtgatgtgttccatcgcgaggcgctgaaaacggcgcatattgccctgatggacattgaccccacccgcctggaagagagccatattgtggtgcgtaagctgatggatagtgcaggggccagcggcaaaatcacctgccacacccaacagaaagaagccttagaggatgccgattttgtcgtggtggcatttcagattggcggttatgaaccttgcacggtgactgatttcgaggtctgtaagcggcatggtctggaacaaaccattgccgatacgttggggccgggcggtattatgcgcgcgctacgtaccattccgcatctgtggcaaatttgcgaggacatgacggaagtctgccccgatgccaccatgctcaactatgttaacccaatggcgatgaatacctgggcgatgtatgcccgctatccgcatatcaaacaggtcgggctgtgccatagcgtgcagggaacggcggaagagttggcgcgtgacctcaatatcgacccagctacgctgcgttaccgttgcgcaggtatcaaccatatggcgttttacctggagctggagcgcaaaaccgccgacggcagttatgtgaatctctacccggaactgctggcggcttatgaagcagggcaggcaccgaagccgaatattcatggcaatactcgctgccagaatattgtgcgctacgaaatgttcaaaaagctgggctatttcgtcacggaaagcagtgaacattttgctgagtacacaccgtggtttattaagccaggtcgtgaggatttgattgagcgttataaagtaccgctggatgagtacccgaaacgctgcgtcgagcagctggcgaactggcataaagagctggaggagtataaaaaagcctcccggattgatattaaaccgagtcgggaatatgccagcacaatcatgaacgctatctggactggcgagccgagtgtgatttacggcaacgtccgtaacgatggtttgattgataacctgccacaaggatgttgcgtggaagtagcctgtctggttgatgctaatggcattcagccgaccaaagtcggtacgctacctagccatctggccgccctgatgcaaaccaacatcaacgtacagacgctgctgaccgaagctattcttacggaaaatcgcgaccgtgtttaccacgccgcgatgatggacccgcatactgccgccgtgctgggcattgacgaaatatatgctcttgttgacgacctgattgccgcccacggcgactggctgccaggctggttgcaccgttaaaacgcgactaaacgctactgcgccgggggatttattccggcgcacacctctgacgataccaataacagaaggcgggcgttggtaacagcgacccgataccctatgagcatttcaatgactacaaaactcagttatggatttggagcgttcgggaaggattttgcgatcggcattgtgtatatgtacctcatgtattactacaccgatgtcgtcgggctgtctgtgggtttggtcggtactttgtttctggtggcgaggatctgggatgctattaacgatccgattatgggatggattgtaaatgctacgcgaagccgatggggtaagttcaaaccctggatcctgatcggtacgttggcaaactctgtaatcttatttctcctctttagtgcgcatctgtttgaaggtactactcagattgtctttgtttgcgtgacctacatcctctggggcatgacttacaccattatggatattcccttctggagcctggttccaaccatcacgctcgataaacgtgagcgcgaacaactggttccttatccgcgtttttttgccagtctggcaggctttgttacggcaggtgtgacgctaccatttgttaattatgtcggcggtggcgatcggggatttggctttcagatgttcactctggtactgatcgccttttttattgttagtaccatcatcactctgcgcaatgtgcatgaagtctttagcagtgacaatcaaccgtctgctgaaggaagccatctgacacttaaagccatcgttgcgctaatttataaaaacgatcagcttagttgcctcttgggtatggctcttgcttataatgtagccagcaacattattaccggctttgctatctattatttcagttatgttatcggtgatgcggatttgttcccctattatctgagctatgcgggagctgctaacctggtgacgttagtattcttcccacgcttagttaaaagtttatcccgacgcattttatgggccggagcatctattcttccggtgttaagctgtggtgttctcctgttaatggcattaatgagctatcacaacgtcgtcctcattgtgattgcgggtattttgctgaatgtgggaacggcgcttttctgggtattacaggtcatcatggtggcagatatcgttgattacggtgaatataaactgcacgtacgctgtgaaagtatcgcttactccgtgcagactatggtggtgaagggcggtagtgcctttgcggcttttttcattgcggttgtgttagggatgattggctatgtaccgaatgttgaacagtctacgcaagccctattaggtatgcagtttattatgattgctctaccaactctgtttttcatggtaacgctgattctctacttccgtttctatcgcctcaatggtgacacgctgcgcaggatccagatccatctgctggataaatatcgcaaagtaccgcccgagcctgttcatgctgatattccggtcggtgcagtgagtgatgtgaaagcctgacgtggacaatagctaacgaaaatggcctgatgcgatatgtttatcaggccacgtcttaatgtaatgctttggatttgcaaattttgtagaccggataaggaattcacgccgcatccggcatcaacaaagcgcaagttgttatccggttatcaagccaaagcgccgtagctggcggcaatgaaagcgagcgaggaatatcaccgtcgttaatgcgccaagcagcgcgcagaacatatcggattgcgtgtcccactggtcgccctgggtgccgagaaaatcatccgctccctgacccattgccagcgctgcccaccactcgattaattcatacatcgcgcttatcgccagcgccacgcagcagaccaggaacgccaccattttacgtccgcgcacgtacatcccgcgaacgagaatttctcgtgccaccagtgcaggcaccagcccctggaaaaagtgccccagcttgtcatacggattacgactcaaccccagccattcctgcacctcaaaaccaacggggactttcgcgtaggtgtattgtccgccgaccatcaggatgatggcgtgaaggaaaatgagcgtatagagcagcggcgttaacggataacgtctggcggtggcaagcagtagctgcacgacaataatcaccggtgtcacttccatcagccaggtgagtttgtcatgggcgctaatgccggtataaatcaggattaacgttagcgtcagtgcgctggtgttaagaattaacggcttgagtgtgcgggtcatggtgagttcgcaaatcagggaaaatactgactattcaccagcaagcgtgaaattacaatcgcaaaagaggtggccagggggatcacctggcagcatgctgccaggcgctgggccgaagaggttacttagtgcagttcgcgcactgtttgttgacgatttgctggaagaagtcgttacctttgtcatcgaccaggataaacgccgggaaatcttctacttcgattttccagatagcttccatacccagctccggataagcgacgcactccagatgcttgatgctctgctgcgccagtaccgccgccggaccgccgatgctaccgaggtagaagccgccgtgtttatgacacgcgtcggtaacctgctgactgcggttacctttcgccagcatgatcatgctgccgccgtgggattgcagcagatccacgtaggagtccatacggcctgcggtggttgggccaagactaccacttggataaccggcaggggttttcgccggacccgcgtagtagatcgggtgatctttgatgtactgcggaagttctttaccggcgtcaatcagctctttcagcttggcgtgtgcaatatctcggcccacgataatggtgccggtgaggctcaaacgagtggataccgggtattggctaagctgggcgaggatctctttcatcgggcggttaaggtcaactttcaccgcttcgccttcaccggcctggcgcagttcttgtggaatgtactggcctgggttgtgttccagtttttcgatccagataccttcgcggttgattttcgctttaatgttacggtcagcggagcaggagacgcccatgccgaccgggcaggatgcgccgtgacgtggcagacggataacgcgaatgtcgtgcgcgaagtatttaccgccaaactgcgcgccaagaccgagtttctgggcctcttccagcagttcctgttccagctggacatcgcggaacgcctgaccatgttcgttcccttccgtcggcagttcatcgtaatagtgagcgcttgctaacttgacggttttcaggttggtttccgcagacgtaccgccaatcacaaacgcgatatggtacggcgggcaggctgcagtaccgagggtacgcattttctcgacgaggaagtttttcagtttgccgggagtcagcagggctttggtttcctggtagagatacgttttgttggcagagccgccgcctttcgcaacgcaaaggaatttgtactcatcgccatctaccgcgtacaggtcgatttgcgcaggcaggttagtgccggtgttgacctctttgtacatgtccagcgccgcattctgactatagcgcaggttatcttcgatataggtgttatagacgcctttgctcagcgtttcttcatcaccgccgccggtccacacgcgctggccttttttaccgacgatgatcgcggtgccggtatcctggcaggtcggcagcacgcctttggcggcgatttcggagtttcttaagaattgcagcgccacgtacttgtcgttttcgctggcttctggatcgtgaagaatagccgcaacctgtttctggtgtgccgggcggagcataaaagaagcgtcgtgaaaggcttgctgcgccagcagggtcagggcttctggttccactttcaggatggtttcgccgtcgaagtcggcaacgctaacgtaatcggaagtgagtagatagtattcggtattgtctttccccatcgggaaaggtgcctggtagataaagggtttgttactcatagcttccagcctgtaactctgtatttgttattcgaaaatggcgtgccgcgtagtcacgggcggcacgcaaagtgcatttataagaacccgtacatcgcggcgaagatccagccgaagacgcagcttacgctcacaccaatcaaccccggcagaataaagctgtggttgatgacgaagcgaccgatgtgggtggtgccggaacggtcaaactgaatcgctgccagatcgctcggataagtcggcaggatgtaataaccgtagcaagccggtgcactagccacgatgtatgccggatcaacgccgatcgccagcgcgaccggaacaatcgccgccagcgccgcagcctgagagtttacaaacttggaaaccagcagcagaacaatggcataggcccacggatactctttcaccatttcacccagtacgccctgaatttcagacatatgcgcaccgaacatggtttctgccatccatgcgataccgtacaccgccacgatggcgatcataccggaacggaagacttcgtttttactgatagacgcgggattggttttggtcaggataataatcagcgccccggtcagcagcataaacatctgaataaccagtaccatgctcagcggtttgccgccgaaggatggacgcaggtcgctatcagcaccaagaagggcgactacagcgattgccccgaggaaaatccacattgccagccagttgcttttcggcagttttttatccagcagcgtcgcggtatcaccgtaaacatactcacggttttccggtacggagatgaatttctggaactcttcgtctttatccagatctttaccgcggaaccagctgaagataccgatcgccaggataccgattaacgtgcttggaatggtgattgccagcagatcgaggaactcaagatggcgaccatcaaaggtgacattacccagcatcgcaaccagagacacgaccgcaacgctcaccggactggcgataatccccatctgtgcaccgatagaacttgccgccatcggacgttccggacggatgttgttcttaatggcgacgtcgtagatgatcggcagaatggtgtaaaccacatgacccgtaccgcaaagaatggtcagtgtacaggtcacaaacggcgcgacaatactgacatatttcgggttgcggcgcagcagcttctcggcaatttgcagcatgacatcaagaccgccgctagcttgcaaggtcgcgcttgccgccaccaccgcaatgataaccagcatgacatcaactggtggtttacctggctgaaggtggaagacgaagaccagaatgaccagaccgataccgcctaataaacccagcgcgataccaccctttctggcaccataaaacagacatatcagtattatgataagttggatagtaaataacatgtgtgaaccctcgcgataatcctatttaaatttttgctgaatagatcacagtcacgttctgttttgtatgaactgttttcagagcctgactaaatatccgtttggtcgttaccggctttagcaaatacctcacagtgaatattggctgattaaagcagcggcaaatttatgcactgtgataagcggctttttcagagagaaagactctctggcgatgggtttatagtttgtactgcgcagatgttaatgttttgtttgctgttatcttattgatatttatcggtctattttttgttctcagggcagatgtcattaggtttatagattaatctgatctacccatttgtgggtaaaaatacacataatgcgggtgacataatagttaattaacttttgttagcgttttgaaattaaaaacaccgttcacctgaagagatattaatttttagcgatgatggagggataattatatttgatctggcacaagttttactgatgaaggatgtaacttgtgccaggggtattttgcattacggtaataattattacttacagataaccagcgatccgttattggcaatattgtttcagtagactgtagtgttctgcctgaatacggtaacggtaaactggacgccccgtgacgccataatggatactggtgaacaagatgtggcagttgaccagccagatgaggtatttacggcaggaaacacggctaatgttaacctcgttggctagctcgtcggtactaaattcatagtcctgatgcgcgtcaatccactggcacagtgtgcgtaacgtctgcggcgttaagccttttggcaagcgacgaggatcctgttcgttggagctgctgccgtggattagctgatcaagctcggcctggtcataatactgatgtttttccagcgccattttcttttgccgccagccggtgagcgcctcttcaaagcgggaagcctggaagggtttgatcaggtaatccacgacaccgtaatgcaggctatctttaatggttgccgcatcggctgcggaggagatgacaatcacatcacttttgcaacgcgcgttatgcaggacaggcagtaaatcgagcccgttctctttttgcatatagatatcgagcaatatcaggtcgataggcgtatcgctattgaagataatctctttggctttctccagcgtgctggctgttccacagcattgaaagcctgggatttgtgctacgtatcggcgattcagctccgcgaccattgcgtcgtcatcgataattaatacattgatcatctgttgctcctctccccgtcccagggtatctggacaaaaaattgtgtgaaaatcccgggttcgctttccacggcgatgctgccgccgagattttctacctgttgtttgacaagtgctaaaccgacgcctcgctcgcttccttttgtgctgacacctttgtcaaaaatgtgatcgattttatcgggtgcgatccccggtccatcatcattaacttcacagtgcagccagccgtgacggtagtgcaatgttacgctaatttcgcctccgggttccggccctaatgcctccagcgcgttttctatcagatttcccaacgtggtaatcagcgtcgcgacctggtcctcactgccgctgtctggcagctggctttcactgtttaaaatcagcgtatggcctaaatcggtcgcgcggttaatcttgctgattaaaaaaccagcgataaccggagatttgatcttacccagcagagagccaatctcttcctgatagttattggctgttttgagaatgtaatcttccaactgcttataactcttcagatgcaataatccgagaatcacatgcaatttattcataaattcgtgggatcgttcacgaagtgcgtcagcatagttgaccagaccgtcgagtcgctgcatcagtttacgtacttcagttttgtccctgaaggtactaatggcaccgatgataacgccattactgcgcaccggaacggtgttgatcagtaatagccggtctttaatcgtaatctcttcgtcgcggcgcggggtaccgtcgcgtaacacttcgctgacatctaccacctgactccaactgtggcttagcgtgctcagtttctcatcgtcctggctcttacggtaattcagcaattcttgtgcggcatcgttgatcagcgtgacctcgccgcgatcgtccacggcaacgacgccttctttgatagactgcaacatggcctggcgttgctcaaacagcgtggagatttcgtagggttccaggccgaaaaggatttttttcagtaccttaaccagaatgcaggtgccaatcagtccgaccagcatgccaaataatacgctccagataatgctccagcgactgtcattgatctgttgggtcacacggcttaactcaaggccgatcgccaccacgccaatttgtttatgattttcatcgtagatgggggtaaatacgcgtaaagcctgcgccagaaaaccgcgattgatagcgacattttcttcgccattcagcgctttaaggatgtcatcacctttaaatggctgaccaatacgctgggcttcaggatggctgtagcgaagactttgcatatcggtaacgacaataaacagcagatcgttgcgtttgcgtacggcttccgcgatggcctggatgccactctcctgcggttttttctgcaagccctgacggatttccgggctgtcggcgagggtacgcgccactgccagtgccttgttggctagcccatctcgcgtcatatcactgatttggctgaagtaaatcagatgcaccaccaatagcacgctgaacagtaccgcactgaccattaagatcactgtggtactcaatttcatcggacgtttgcgtaacatgcggtagggcaaactatgtctcatcagcttccttgtgtgacaaatttcttaagcattatctctgatgaggcgggtaattcaaagggagtaagaatgattggctatataggggaagagactctggcaacggaaactgccagtgctgtatgaagattccggggctatgcttatagcgataatcatactgatgagagagggaaggtcatggatcaggcgctactggacgggggttatcgctgttataccggcgaaaagatcgatgtctatttcaacactgcgatatgtcagcattctggcaattgcgtacgtggcaacggcaagttatttaatctcaaacgaaagccgtggatcatgccggatgaagtcgacgtcgccactgtggttaaagtgattgatacgtgcccgagcggcgcgctgaaataccgtcataaataagcgagggtaaaatggaaatacgcgaaggccacaataaattttacattaatgacaaacaaggcaagcaaatcgctgaaattgtctttgtgccgaccggagagaatttagcgattatcgaacataccgatgtcgatgaaagcctgaaagggcaagggattggtaaacagctggttgcgaaagtcgtggaaaaaatgcgtcgggaaaaacgaaaaattatcccattatgcccatttgcgaaacatgaatttgataaaacgcgggagtatgatgatattcgcagttgatgggagagtacagagtcacgatatttttcattctctccgcgatgtgatgcaggagagcatctgaagggtagggggatgcacaaagaatgggcagagagcgcgtttttttgtcccaagtcatcccctttactgagcaaaaaaaagaatatctcctatatgagaatcatcaatcggggttaataagttttgcgtccccagagcgtttaatattgataggagtcatattatggaaggtaaaaacaagttcaatacttatgttgtttcttttgattatccaagttcttattccagtgtgttcttaagattaagaagtttgatgtatgatatgaatttctcctctatcgtggctgatgaatatgggataccacgacaattgaatgaaaactccttcgcaataacgacaagcttagccgcaagtgaaatcgaagatttaatcaggctcaaatgcttagacttaccggatattgattttgacctcaacattatgacagttgatgactatttccgtcagttttacaagtaaccaggaaggataagaagaacataaaaaatggcactattctctaaaatattaattttttatgtgattggtgtgaacatatcctttgtcattatctggtttatcagtcatgagaaaacacatattcgtttacttagtgcattcctggtcggaataacctggccaatgagtctgcctgtggcattacttttttctctcttttaagagctgtagttgagtggacccgctggttatcgtgaaacgaagcgtctctcctcaaaactggatttgcggaacgatgaacgaagcagtcgcctgactgcttcgttcattaaagtgaaatttatttctgtgggcgcatcgccgggaagagaataacgtcgcgaatagtatggctgttagtaaacagcataatcattcggtcgataccaatacccagaccagcggttggcggcagaccatattccagcgcagtcacgtaatcttcgtcatagaacatggcttcgtcgtcacctgcagctttagcattaacctgttcctggaaacgttcagcctgatcttctgcgtcgtttaattcgctaaaaccattaccgatttcacgaccaccgatgaagaattcaaaacggtcggtgatttccgggttaacatcattacggcgtgccagcggggacacttctgccggatattccgtaataaaggttggctgaatcagatgtgcttctgccacttcatcaaagatctctgtgacaatacgtcccaacccccagcttttctctaccgtaataccgatagattcagctaatgctttagcagcatcaaaattatccaggtcggccatatcggtttctggacgatattttttgattgcttcgcgcatggtgagtttttcaaacggtttgccgaaatcaaacacatgctcgccataagtgactttagtggtacccagaacctcttgtgccagggtgcggaacagactctctgtcagttcaatcaaatcgtggtaatccgcatacgccatgtagagttccatcattgtgaactcaggattatggcgaacagaaataccttcattacggaagttacggttgatttcgaatacccgttcaaaaccgcctacaaccagacgtttcagatacagctccggcgcgatacgcagatacatatctaaatccagagcattatgatgggtaataaacgggcgagcagatgccccacctggaattacctgcatcatcggggtttctacttccataaagccgcgcgcgaccatgaattgacggatagcggccagaattttactacggacaacaaacgtttgacgggatttatcgttagcgatgaggtccagataacgttgacgataacggacttcctgatcctgcagaccatggaatttatctggtaaaggacgtagtgctttagtcagcaggcgcagctcagtacagtgaatggaaagctcacccgtttgcgtcttaaacagcgtaccgcgggcaccgataatgtcacccagatcccattttttaaactgatcgttataaacaccttctggcaggctatctcttgcaacgtacagttgaatacggccaccgacatcctgcaacgttacaaaggaggctttccccatgatacgacgggtcatcattcggccagcaacgctgacttcaatgtttaaggattccagttcctggttatccttcgcatcaaactcttcgtgcaactggtcagaggtatggtcgcggcgaaaatcattgggaaacgccacaccttgctgacgtagtgccgccagtttttcgcggcgatttctcagttcatcgttaaaatcaatagcctcattggctccccgtgtttcttgttcagacattttggttcctctaaatccagctttcaatttagcgtagataaagagacagatcggtacactgtattatctgcctcgactattagtaactcagtttatcttatcgaaactaacgcttacctcaagttgatatcactaataaataaccatcaaaatggtttaaatgacttattaatctcgatttgttagtgttataaactaaaagttaatttattcataaccaattgtttttacgacagttaatcgttgctctcctgtatcatattcgtcggcgtgctaaacagaaaacgggtagcaaaggccaatacgacgatgatcgcgacacaagccaacgtccactctcccatctgagaaaagaatcgctggtaagctgcaattgccataccgctaatttggctctctgtcgtctgctgtgccacgacgcctgccagccagttggcgaccgcgcctgttgccagcatataaatcccggttaatacgccagacattttcagacgcgtgatttgcgcaatcgccaccgggtcaataaagagttcggcaaagcccattagcgccagcccggatatcatcacgcccatactcgcttgaccgtcagccgctgcatgtcgggcatcaaatgccaacaacataaagccacaagccatcagcagtaagccaaaggcaaacttcagccagacgcgcaatgtactgttgccgcggctttctgggctcgccagccaggccagtacaaccccagcgagcatcaccgcaattgcattcacgctctggaatagtgctgtaggtacttcaatattgaatgcctgacgattcacaaagcgatcgataaacaagctgatggtactgccgccctgttgtgccagtacccagaacaatgtcccgacaaacatcaacaatacaatttgccaaagagcacggcgatgttcggggaatttgatcatcatgcgggcaatgatttgtgcggcaatgaggcaaacgatcgccagcaaatatccggaccagtcgttctccagcagcagagtaaaaaatactggggctaaacagagcatcaccactaaccagctccatactggtaaggcaaatttgacactagtgagcgcttttttatccatactacgtgtggactggaaatgacgatgaccgcttaagaaaatcaacaaaccgataaacatgccgccacccgcaagggcaaagccaacatgccatccataccactgagcagccaggccgcaggcgattggggctgcgatagaaccgatattgcccgcagcatacagcaggctaaaaccgccatcacgtcgatgatcgttctcgtcgtagagctcgccaagcaaacagctgatgttacttttgaataaaccgtagccacaaataatgattgccagcgccagatacaggctaaaggtactatttgtatcaatacccagcaccacatggccaagggtcattaacagcgcgccggcaatcactgcagtgcggttgccgagcaggcggtcggcaagccagccgccgagaataggggtaacgtaaaccagagaagcatatgcgctgaacaggctgatggcatggttatcatcaaaaccaagctgatgggtgagatagagaatgagtaaggcacgcatgccgtaaaaactgaagtactcccagatttggatcgccacgatatagtatatcgcgcgcggctgactgggtgttttcatgtgttctccttatgagcaaaaaagggaagtggcaagccacttcccttgtacgagctaattattttttgctttcttctttcaataccttaacggtatagcggccatcagcctgacggtatgcaccgtgaatatcggtttcaaagcccggatagtgagcgccgatttcacacagcatctgcaggaactccagaaccggacggctttcttcggtgatcatttcacccggcattaccagaggaactcccggcgggtacggaaggatcatattggcgttaatacgacctaccatttcgtcgaggtaaacttcttcggtcataccgtgcagctctttctggaatgcagcatacggagtcattaccatcgtcggcagcacttcaaatgcgcgatacatcagatccggcagattgtggtgaacaatcagtttgtggatattctgagccagttcctgaatacgcatgttttcatagaattcaggatcttcacgatacagagacggcagcatgtttttcacacgcaggttcaggtcgaacgcacgtttaaagtcagtcagagcacgcagcaggctcagtgctttggtcttatcgataccgatgctgaacaggaacagcaggttatacggaccggttttctcaacaacgatgccatgttcgtcgaggtatttcgccacgatgctggccggaataccaaagtcgctcatggtgccgtctttttccatccccggagtcagcagggtgactttgatcgggtcaagatacatgtgctcgttatcgatgtttttgaagccgtgccaggtgctgtcagaacgcagcggccagcattcagtcgtatcgatatgatccggctgccatacatcaaagaaccagccatcagattccgttctcagacgtttgatctctttacggaatttgatcgcacgttcaatagaaccgttgatcagacgcttacctgcattgcctttcatcatcgccgcagcggtttcagtggacgccacgataccgtagtgcggagaagtggtggtgtgcatcatgtaggcttcgttaaaggtttcttcgtttacgtcacctttaacgtggatcatggaagcctgagagaacgccgccagcagtttgtgagtggactgggtttcgtaaatcactttcccttctacacggccaccgctcataccgcatttaccttcgtaaatcggactgaagttggtgtaaggcacccacgcggagtcaaagtggatggatttcacatccagtgttttcttgatgaagtcggtgttgtacagcagaccatcataggtagagttggtaattacagcatgtaccggccaggttgcgtttggtgtttctttcacgcgcttagcaatggtagcgtgctggaattcactctgtgggataccaccaagaataccgtaagcgttacgggtcgggcggaaatagattggcgtaacatcgctcatcatcatcaggtgggtcaggcttttgtggcagttacggtcaatcagaatggtgctgcctgctggagcagagtacataccaacaattttgttcgcagtggaagtaccgttggtcaccatgtagctgcggtctgcgttaaagacgcgagcgatatactgttctgcttctttgtgtggaccactgtgatccagcagagaacccagttcagatacactaatggaaatatcagatttcatggtattcggaccaaagaaatcatagaacaggctacctaccgggcttttctggaatgcagtaccgcccatgtgaccaggagtacagaaagtatatttaccttcacgaacatatttaaacagtgctttagtcagcggaggcagaatagtgttgatatattcgtcagtggtctgcttgatcttattagcaatatcttcagcagcacccagcgcatattcaaagaagctaatctgtaaacgcaggtcattcaggcttacatcgagagtggaatacgtattagcgaacgcgtacaacggcaggttctcgttcattttgctaatttcttcgcacagctcgagattatatttatcccagtcaaaaataacgccgcacagacgcgcattgttttcgatcagttttaataagtcgtcacggtcgttcgggtaaacaatctggaagttcagacgttcaagcgcgcgatgaagttcacggatgggttcttctttaaaataaacccccatgtgattcaatattgcaataacgttcatagtcatatctccaggtaaaaaaggcccctcccaacacatgggacaaaatgaaaggaggagcctcggaaaatacttttaattaatgtgcgttagacgcggtgtggttatccatactgtggctctggcgctcgtgcattttgcgagcgtagaacatcaggataatcaggctgacgatgaaggtacctgccagctcgaaggagcttgcgcccatcagcgcgatgaagcagaacacgcaacccagtacagagcagatcaggctgacaaagttgcggatgttaacgccttcaaaacgaatcaggtcaacgcaagagtagaaatacggcagcatagtcagcagtactgcgataccggtcagttcaccgaacaggtcagatgctttaccaccggcagagttcatcagagtgataaggatcatcagggcagtcattttcactgcagccagcagcagaccttttttcggaataccgttgctgtcgacttcaccataaactttcgggaagttaccgtcgttagcggcacgtacacctgcctggcctaccaacatcatccaggagcccagagaagtcaggcacgcaaaggcggtgaatgcagaaaccagcggcgcagcccagttaccgaggatagtactagcactgattgcaaacggagcaccggaagccgccattacagaagacggatacataccggaaagcacctgagtcgcagcgatgtaaacaatacctgctaaaccagtacccagcatggttgccagcggaacggtacgtttcgggtttttaaccataccagtacttacagctgcggattcaacacccacgaaggcccacaggcagagcagaatacttttaatgatcgcatgaccatcagtggtatccgcagtattccagttagctgcataagttgccgcatcaaaccaatgccagccaacaatagcagtcatcaccacaggaataagaaccagcaccagaccaatagtggttaaacggcttacccaagtaccgccgagcatatttacaaaggtaaatacccagacgatagcaatacaggcgatacccgccggaacaggatcatttaatactgggaagaaggtggaaagataagatacagcggtaataccaatcgccaggttaccaatccagttagcatggtaataaagaacacctgtctgaaaaccaaatgcaggggaaatttctccggcataagcaattgggccaccttgttgcgggttttttgttgccagtcgggcatatacatacgccaggctcattgcaccaataatagagataatccaaccccagatagcaataccaccgatacttgctaggttcgcaggtaataatgcaataccgctccccatcatattaccggcaacaacaccggtacaggcaaatagcccgatcttcttggcagaactcatgctcttctcctaatttcatttttgaatttggagtccgggtcatgatgtataactatttcctgaccagaccaaactggcgataagattactcacgaaaaaaggattaatcctaaagattaggtgaaataacacaaaagtttctgtaagtgagaacttgaggttttttattaacacatcaggatcgcaagttgatatcatgaaaagataaacatttaatgtttacaatggattgcgtgacattctctggttaaatttatgtaataaaaattatgcggcaaataaattgccgcaacatattataccaacaggaacatacaaaaactcaacaacaaatatttccgagcataaatcaacccggagttacttattcactagcaagaaatttgtcgagataaggtacaacataaggaacagaagtctggaatataccattttcaatccagtaaagggtgtttgcccctgggcgtaaattaaaggcggtgagatatgcatcagctgcttcccggttcatccccttcatttcataaaccttgccaagcaacacataatttagccaggacatttcaagatcaatgccagtatttatcgcctggtaagactcatctgttttaccttttaccagagcactgaccgcttttatttgatatataatggacaggttgttcaattccggcagtgtaacaatgttatctatttctgtgttcagtgctgctaattgtttttcatctaaaggatgttgagaatggcgcacgatatcaactaatgctttttctgctctcgcgtaggtaaattctggggaactttgaacaatctcacctaataattcactggcacggttcaaacttttatcatcgccatgcagtaaataatcatgtgcctgataaaaattagttaataacgcaccacgatgcggcaaaattttctggagcgtctcctgcattcgttgtggccacggttggtttaacgctttacttaaactctccagtaaatcattttgaatcgccagctgattaccgttagtgatgacataacgtttatccagcatggtactaccatctgcattgtctaccaattttatgctcataaagcattgttgagcacggtattggcgctgattaacaaacgcaatagataatgttttaccggaactgctcggttcatcaatgttgtagttgattttgtcatgcaccataaaggtggagaaggtgttaagacttgtcgccaccaaatcacccacgcctatcgcgtaagagagctgatacggggaactccagctgttacaacttttatttaccatattaatgtcaatatcgcgtggattgagcaaaatacggcttttgctcataggaagacgtgtatcaagactactaaacgctaccagtgctacacagatacctaagctcaacaggaaaaaaaaccatacccaaaaggtagtgaatcgtttgcttttaactggggattgttcaggtggcgttgcggtgttttgaatgttaagactgtgggagggagaatctgtggcaggaaccgcctctggtatagggggagggctagatagcattatttcctctccctcttcttcgctgtaccagataaccggcaccattaatttatagccgcgctttggtacagtagcgatatagacaggactatcttcatcattatcttttaaactcttacgtagttcactgatactctgcgtcacaacgtgattggtgacaatacttctcttccagacattatcgataagttcatccctgctaagtacttcgccactgtgttgagcaaagaaaaccagaagatcgattaatctcggctcaagggtaagttgacgcccattgcggctaatttggtttatggacggagtaacaagccattcgccaacgcgaactacaggttgttgcataatagaaactcattcgaaaagggaatgatgcaatgataattgccacaacctatttttaccatctatagatgggtttatttacatattattggtgaatgcaagacgttatttttaccagccataaacttcttgattacatagtattacgaaaggattttactgagaaccagaagtaatattccttaccatcaaaattcatcatctttgccaaagaaaaatgttcagaaaataatccatggaaaattgtccggagcacttactattttaatggattgttagtctttgcatgagcaagcgaactgatacatttctctttgttctcattcagaaaatctcatcagtcgccgttcagaccggtgttgtgctttatggatgcgttacgctcctgatgacgtcatttgacgttcaacagcatcacggggccgcacgacatttcacgtcagttagtgctatagctcaggaacaaattttcccgaattgggatatgcccgcaaattgctggtgatgtggggagaatctggttgagttcggtagaattgatttggaggcagaacgcttaaatcgtggcgtcctgaaacgaaaaacggacctccgtggaggtccgtttatatgaatttggtgcccggactcggaatcgaaccaaggacacggggattttcaatcccctgctctaccgactgagctatccgggcaacggggcgcattaaaccgtaatctgcacatctcgtcaacctaatttcagtaaaagcgattcaactgcttaagattgcggcaaatcgcttcttttctgtgtttctgtcaggtcaatgcaccaccctggcggcagcgggcgaagcgcaggatatcttccgccagccgatgtgcagtgtcgacatccgcctggctacgattcaccagcattcggcttaaacagccttccagcaccagttccatctgctttgctaccatcgccggatcgtcaacttccagtgtggttaacagttcgtgggtgaaatcgtaggccgcgcttttttgctgatcggccagttgatgaatagggtggccaggatcgggataaaacgtacaggcagcgataaatagacagcccggatagcggttgtttttaacgcactcgcttaacgcctgataacgtgccagcagcttttgttcggcggtttgcgtttcgtccagcatcagctgacgacgccagacatctatctgttggctaagataacgcagcgcatcgtagaggattgcctctttgtctggccagaagcggcgtagctcgtccagtggataatccacacgttcagcaaccatctccagcgtggtgttggcaatcccttgtaattctaataatttcagggcttctcccagtacatcttcacgttgcacgctattttcctccgtctttcccactgcaagtgtcgttcacggttggcgatcgcgcaaatgtgcgctgaaggtttcagcatccataaagcccgtgacgcgtgcttgtggatgctcctggccttgtccgtcaaaaaagagaattgtcggtaggccaaggacattaagatgctttaacagcgccacatcttgtgcgtcgttggccgtgacgttggcctgaagtaagaccgtgtctgctaacgctttttgcacctgcgggtcgctgaaggtgtatttctcaaactctttacaggcgacgcaccagtcggcataaagatctaacatcaccggtttgcctttggcttcaacgagcgcctgatttaactcatctaccgttttgatttgtgtaaagttgagatgcgtctgagtttgcgcggtatgcgtcgcaccaaatgcccaatcctgaagtgggcgcacgctaaccaatgccgctgccagcagaataatttgcacaatacgcatccagccgcgtttagcctgtaggctggtgataaaggcccagccaaagaatgcgacacccagcgcgctccacaagcgtaatccccatacatcaccaatcactcgctccagcaggaagaccggcagtgcgaggatcacaaaaccaaacgcggttttgacttgttccatccacgggccgcttttcggcagcaagcggttaccaaagacggtaattagcatcagcggcaggcccatgcccaacgcatagagataaagcgtgccgccgcccagccacatgttcccgctttgggcgatatacagcagaatcgcgctaagcggtgcggtggtgcatggactacagatcagtccggcaatcgcccccataacaaacacaccgccaggactgccgccctgttggcgattgctcatcaacgtgagacgtgtttgcaggctagaggggagttgcagggtaaacaagccaaacatactcatcgccagcaaggtaaagacgatggcgaggccaatgagcacgtatgggtgctgtagcgccgcctggaactgtaaccctgcggcggcaaccaccagacccagcgccgtgtaggtcagcgccatcccctgcacataaataaaggtcagcaacaatgctctggcagtggagagccgctgtttaccacccagcacgatgccagaaatcagtgggtacattggcagcacgcatggcgtaaaggcgataccaataccgatcaacaacgcccagagcgcggaaaagggcaattgcgcggtgggctgctcttgctgcggaacagacacaggctgtggcgctgcgttgttggcgaccacttcgcttaacggaacggttttggtttctggcggataacagaaaccggcatcagcacagccctggtaggtgacagttaacgtcgctcccgcactcgcctggttgatggtgacgggaagcgtcagccgatcgcggtaaatctcgcttttgccgtaaaactcatcttcatgccagacgccttgcggcagctgcacgtcggcaattttcgcgtgttccggcgtaatgcggatctgtttacggtagaggtagtaaccgtctttgatctgccaggtcagattaaggtcatgttggttttgctgaaaatcaaaagcaaaggcttgatccgcggggacaaattgactacgtcccggcgcgtcgaataatccggcaaaaacggaagtgctgcaaagtagcaggatcagcgtaaagatgcgttgagccatgagaggtaatctgtgtctccttatgtcagcgtaaagatgcgttgagccaactgaggtaatctgtgtctccgtgtgtaacaggtaaaaccagaagttccggggtttgatatggatgatgagacttcaggcattccagcagtgcctgctggtgagatacggtagtttttaaaatcatctgcacttcgtattcttgctccagcttaccttcccagtaatagagagaggtagcgccggggatcaaggtcgcgcaggccgccagtttttccgccagcactttggcggctaaatcctgggctgtcgcttcatctggtgccgtacatagcaccacgacagacgcggtattgctacttttttcatcaagcataaacacctcgcaagaacagatggaaccgcaagagagaggtcactatacaacggacgggggaaggatgttagtcggcgggaaagaaagcggggcgtgaacgccccgcgattgatcattacagcatgaagctacccagcacgaagccgaagcaaacggccagggcaacacccagagtacccgggatgaagaacggatggttgaagacgaatttaccgatacgggtagtacccgtgtcatccatctgtaccgcagcaaccagcgtcgggtaggtcggcagaatgaacagaccagacaccgcagcgaaagaagcaacagcggtcagcggactaacgttcagtgccagagccatcggcatcagtgcttttgcggttgcagcctgagagtacagcagagcagaagcaaagaagaagatgacggccagcagccacggatgaccctgaatcacttcaccagcggtatctttgatccagtcgatgttgttggaaacgaaagtatcgcccagccacgcaacacccaggatacaaatacaggcgctcatacctgctttgaaggtgctggagttgaggatgttgtcggtatcgactttacagataacggtggtcagagttgcaacgctgagcatgatgatcaggattgcgttggtggtgttcatcagcggtttttcaaccagacccatgcttgggctgttgatgattgcatagataaccacgccaactacgcccagcaggaacagccagacggacgtttttgcaccggatttgatttcaatctgcttttcaccgcgcagttcaaccaggccctcttccagacgcttgcgataaatcggatcgtcagagagtttggagttgaacagcatagtgaccaggaaggacatcaccagaaccgccagcagggtggacgggatgaccacggagagcagatggaggtagctgatgccatgaccttccatcacggaagacatgtaaaccactgccgcactgattgggcttgcggtgatcgcaatctgcgcggataccactgcagtagacagcggacggcaaggtttaacgccttgttccttcgcaacttcagcgataactggcagtgtcgccagagagatgttgccagtaccagcaaagatagtcaggaaataggtcacgatcggtgcgaggatcgtgatgtatttcgggttacggcgcagcagcttttctgtctgatgaaccagatagtccagaccgccagcaacctgcatggcagaaatagcggcgataaccgccatgataatggagatgacatcgaacgggatgttaccgggtttaacgccaatagcggcaagaaccagcacccccaatccgcctgcaaaaccaatacctattccccccaatctggcgcccaagaagatcgccagcaaaactatgatgagttctacaactagcatattagccttccttgttttttaacaagttgatattagattgttatttttaagttactgctcacaagaaaaaaggcacgtcatctgacgtgccttttttatttgtactaccctgtacgattactgttcgctttcatcagtatagcgttttgctttgtaagccgggtgcatcagattctgtacggagaaaatatcgtcaagttccgcttcagtcaacagaccgcgttccagaacgacttcacgtacactcttaccggtttcggcacagattttacccacgatgtcaccgttgtggtgaccgatgaacgggttcaggtaagtaacgataccgatagagttgtaaacgtaaccttcgcacacttctttgttagcagtgatgccgttaatgcatttttccagcaggttgtagcaagcgttggtcagaatgtgaacggattcgaacatggcctggccaatgaccggctccataacgttcaactgcagctgacctgcttctgctgccatggtaacagtggtgtcgttaccgatgactttgaagcatacctggttaaccacttccggaacaaccgggtttactttagctggcatgatggaagagcccgcctgcagttccggcaggttgatctcgttcaggccggcacgtgggccactagagagcaagcgcaggtcgttacagattttggacatcttcacagccaggcgtttcagcgcgccgtgaaccataacataagcgccgcagtcagaggtcgcttcgatcaggtcttcagccggtacgcatgggaagccagtaacttcagccagttttttcactgccagcggagagtactctttcggcgtgttcagaccagtaccgattgctgttgcaccaaggttaacttccagcagcagttcagcggtacgttggatgtttttcacttcttctttcagcaggatgctgaaagcgcggaattcctgaccgagggtcatcggtactgcgtcctgcagctgggtacgacccattttcaggatgtcctggaattcgacagctttacgttcaaagccttcacgcagttggttaatcgcatctaccagcttaatcagggaagagtaaactgcgatacggaaaccggtcgggtaggcgtcgttagtggactgacatttgttaacatggtcgttcgggttcaggtactgatattcacctttttggtgacccatcagttccagaccgatattggccagcacttcgttggtgttcatgtttacggaagtacctgcgccgccctggtagacgtctaccgggaactgatccatgcattttccgttgttcaggacttcatcacatgcggcaatgatggcattcgctacacttttaggaatggtttgcagctctttgtttgccatagctgcggcttttttaaccattaccataccgcgaacaaattcaggaatatcactgattttgttgttgctgatatagaagttttcaatcgctctcagagtgtgaacaccatagtaggcatcagctggaacttccctggtacccaacagatcttcttcgatacgaatgttgttactcatgtgaaccttctttttcaagctgccaatgatttgctttaaacacacagaatatatgtggtttcgaatgtttttcgaccgacgattatcccctgcatcgaccgaatacccgagatcatatgctgcttgaggatttctaccgtaatctggatcactttaagtgtcggtttttaccccttaattattaatttgtgaaatagatcaccgctttgggattactaccaaaaatagttgcgcaaacatcttgaaattttgctaatgaccacaatataagctaaacgcgattcgcaacccattcaggtagccggggttaaccggctgctattacaggagaaacctttgcgctggttaccttttattgccattttcctttatgtctatattgagattagtatctttattcaggttgcccatgtattgggggtattgctgaccctcgtgctggttatattcacgagtgttatcggtatgagtctggtacgtaaccagggctttaagaatttcgtgctgatgcagcaaaaaatggcggcgggtgaaaacccagcggcggagatgattaaaagtgttagcctgatcattgctggtttgctgcttttattaccgggcttttttaccgacttcctcggtcttctacttttattgccgccggtgcaaaagcatctgacagtgaagttgatgccgcatttgcgcttttctcgcatgcctggcggcggttttagcgccgggaccggtggcggtaatacttttgatggtgagtaccagcgaaaggatgatgagcgcgaccgccttgatcataaagacgatcgccaggattaatgtcgaaacgccggattatgtggttatgccattttccggcgtttttcgttttggcagcaacagccataaccccgccagcatgatcagcgcatagagacttttccagccgaccattgccagtaacagaacgcataacagcccgccaaccaccgccagtagtcgataacgtccttgcaataatttacagcctgccagcatgcataacagataaatcataataaagatgccattggcataaataataagagcgtccagattgatctctaaagcatgaatcaccaaagtgctcaccacacagcagccgagcaccgcattgagggcattattcgggatatggcgagaagagaggcgtgccaggtagtggtcaggattatgttgcgcctggctccagaccaggcgggcgaagctctgtatataaatgttgagactggcaaagcaggccagatagccaatcacgcaggcaatccataacgctcctacaccgaacaactgcactacaatttttggaaggcttgctgccgccgccattttttcaccataggcgtcgaagtgtaagacgactaccgtacagccccagtagactaatcctgccagcagcagaccaatcatcaaagcacgaggaaaatcacgctctggatttttaaattcgctggcgagatgggcaaatgcctccagaccgacaaaacaccagaacatcacacttaacgcagcaaataacccggtaagttcgatattaccaggtgccggaaaggggatattcgcaggtttgatatcgcccgcccaccagatagcgacaatcagcgcgacgataagtccggcaataacggtttgtagattagcactggaactggcaccgcgagtaccgatataccacaccagcgccagcgtaccgagttctgccaacaacagttgccagctatgccagccaaacatcgcctggccgaacccggcggcaatttgtagtgcggcaggcaaacccacgggaatgacgcttaaaaacagccagccggtgactcgctcaagccggctaccaaacgccataccgacgaagtgcgcgacgccgcctgcgctgggatagtggcgacccagaatcgcaaacacaatcgcaatcgggaacactaagataatcaaaacgggccacgcccacaggctgttattgcccgctaccagcgcagctaacgcaggaacggcaaacacgccagtgcctaataaactcgtgcttagcaggccaatgccctgggccagccccagttcttgtttgagtccactcatgggttgatgtccgattgcgcccaaattttgggcaactgcgtagattttcgatggtagcacaatcagattcgcttatgacggcgatgaagaaattgcgatgaaatgtgaggtgaatcagggttttcacccgattttgtgctgatcagaattttttttctttttcccccttgaaggggcgaagcctcatccccatttctctggtcaccagccgggaaaccacgtaagctccggcgtcacccataacagatacggactttctcaaaggagagttatcaatgaatattcgtccattgcatgatcgcgtgatcgtcaagcgtaaagaagttgaaactaaatctgctggcggcatcgttctgaccggctctgcagcggctaaatccacccgcggcgaagtgctggctgtcggcaatggccgtatccttgaaaatggcgaagtgaagccgctggatgtgaaagttggcgacatcgttattttcaacgatggctacggtgtgaaatctgagaagatcgacaatgaagaagtgttgatcatgtccgaaagcgacattctggcaattgttgaagcgtaatccgcgcacgacactgaacatacgaatttaaggaataaagataatggcagctaaagacgtaaaattcggtaacgacgctcgtgtgaaaatgctgcgcggcgtaaacgtactggcagatgcagtgaaagttaccctcggtccaaaaggccgtaacgtagttctggataaatctttcggtgcaccgaccatcaccaaagatggtgtttccgttgctcgtgaaatcgaactggaagacaagttcgaaaatatgggtgcgcagatggtgaaagaagttgcctctaaagcaaacgacgctgcaggcgacggtaccaccactgcaaccgtactggctcaggctatcatcactgaaggtctgaaagctgttgctgcgggcatgaacccgatggacctgaaacgtggtatcgacaaagcggttaccgctgcagttgaagaactgaaagcgctgtccgtaccatgctctgactctaaagcgattgctcaggttggtaccatctccgctaactccgacgaaaccgtaggtaaactgatcgctgaagcgatggacaaagtcggtaaagaaggcgttatcaccgttgaagacggtaccggtctgcaggacgaactggacgtggttgaaggtatgcagttcgaccgtggctacctgtctccttacttcatcaacaagccggaaactggcgcagtagaactggaaagcccgttcatcctgctggctgacaagaaaatctccaacatccgcgaaatgctgccggttctggaagctgttgccaaagcaggcaaaccgctgctgatcatcgctgaagatgtagaaggcgaagcgctggcaactctggttgttaacaccatgcgtggcatcgtgaaagtcgctgcggttaaagcaccgggcttcggcgatcgtcgtaaagctatgctgcaggatatcgcaaccctgactggcggtaccgtgatctctgaagagatcggtatggagctggaaaaagcaaccctggaagacctgggtcaggctaaacgtgttgtgatcaacaaagacaccaccactatcatcgatggcgtgggtgaagaagctgcaatccagggccgtgttgctcagatccgtcagcagattgaagaagcaacttctgactacgaccgtgaaaaactgcaggaacgcgtagcgaaactggcaggcggcgttgcagttatcaaagtgggtgctgctaccgaagttgaaatgaaagagaaaaaagcacgcgttgaagatgccctgcacgcgacccgtgctgcggtagaagaaggcgtggttgctggtggtggtgttgcgctgatccgcgtagcgtctaaactggctgacctgcgtggtcagaacgaagaccagaacgtgggtatcaaagttgcactgcgtgcaatggaagctccgctgcgtcagatcgtattgaactgcggcgaagaaccgtctgttgttgctaacaccgttaaaggcggcgacggcaactacggttacaacgcagcaaccgaagaatacggcaacatgatcgacatgggtatcctggatccaaccaaagtaactcgttctgctctgcagtacgcagcttctgtggctggcctgatgatcaccaccgaatgcatggttaccgacctgccgaaaaacgatgcagctgacttaggcgctgctggcggtatgggcggcatgggtggcatgggcggcatgatgtaattgccctgcacctcgcagaaataaacaaacccccgggcagaaatgtctgggggtttttcttttggtcatctttctagtataagattcagacacggacgacgcgagtggcgtccagctcattgattatggggaataacatgcacgtaaaatacttagcagggattgtcggtgccgcgctactgatggcgggttgtagctccagcaacgaattgagtgctgccggtcagagtgtacgcattgtggacgagcagccaggcgcagagtgccagctgattggtactgcgacaggtaagcaaagcaactggctttccgggcaacacggagaagaaggcggttctatgcgcggcgcagcaaacgatctgcgcaaccaggcggctgcaatgggcggtaacgtgatttatggcatcagtagcccgagccagggaatgttgtccagttttgtcccgacggatagccagattatcggtcaggtttataagtgcccgaactgatgtgatccagaggctgggtgacaaacgtataattgcctgatgcgcttcgcttatcaggcctacataaggcattgcaactgattgaatgcttgagaatttgtaggccggataaggcgtttacgccgcatccggcatgaccaacgatcacgttatcagtcatttcaggctggatggctccagcctcgcattagcaaagatgagattatttcgcctgtggtgcagttttgctggtggattgaacacgtaagtgatgcagcgcgcgtaagcattgatcctgggttagcggttgggcgttattcgccgctacggtgcgaacatagacctgacatggcacacccgcgagttttttcagtcgtgggctgaaatcaagcattcggcgagtgatcgcttctatttctttacccggcgttgcttcacgcgttttcaccactgcgccgctaaattgttctttgccactttcatctttaaagcggtaaagcaccgccagataatggtcgaacaagttatgtttccattccggttgggaataggtgtcatattccagattgccattgtcctggcagtcaacgtcgtataacggcaggaaatctaacagactggtaatacgtaatgccagttcacgcatttccgcattattaattgcatgaatgattgctcgcgccagcatttcaatctgcaactcattgacgactaactcacatttgctaccgtcatgtagcgttaatacgaaggtaagattttcgccttgattatcggtaagttccagcgtgttaacccgacgattaatatcggcatttttaagctcatcaaccagaatttctgggatgttttctgccattttcttaatgactttatcgcgagcttgctcatactgaaggtgtgcagcagcatccagtttatgcttttgatgcagacgactttccagcgcaatcagcaggtcgcgcagttccatgacagacataaagaacaagctttctttattgcgaggttctttaattttcagcgccagtgcaatgaaattattactcttgcgaataacaccggtattaacacccttgatgcttatggccatgtaggttctccctaaccatttctcaattaaataattaattttaatttataagccagataaatgggcttggtagtaatagttgttaaaataacataaatagccgtactcactctatataaacagaaaagaaaggttaattattggtgttagctatataaaaagtaacaacagcaatgcatatgaataattaaaggttatgcaacgggcaaagattaaacttcccagtttaatgacaggttgctgtacttgcgtttgttgctcttgccggatgcagcgtaaacgccttatccggcctacagttcattgcaaatccattcaatttcaatgcacgatgtaggcctgataagcgtagcgaatcaggcaattttaatgtttaacttccctgtttaatcagttactgctggcgtagctggagatccagcggcgttttgctgggttcgccgccaatttctcgcgccagtttcggcaccagatatccgctcaccagtgtcagcaactcacgcataatctgccgtgcttcgtcatcactcaccataaaatgcgccgcgccctgtactttatcgagcacatgcaggtaatacggcattacgccggcatcgaacaacgcattactcaggtttgccagcgtttgtgcgttatcgttcacatcacgtaacagaacgctctggttcagcaaagtaacgcctacccggcgcaacttagccatcgcctgacggaatgtttcatctacctcattggcatggttgatgtgattcaccagcaagatttgcagcgtagaacgggcaaagcattcaaccagcgcctcggtgatacgtgccgggatcacaatcggcagacggctgtgaatccgcagacgttttatatgcgggatggcttccagttgtgtgagcaaccagtccagctcgtgatctttcgccatcagcggatcgccgccggagaaaatcatctcgtccagttccggatgcgcagcaacatactcaagtgcagtttgccagttacgcttgttgccctgattttcggcataggggaagtgacgacggaagcaatagcggcaatttaccgcgcagccgcctttgaccagcaaaagcgcccggttgtggtatttatgcaacaaaccaggcactacgctgtgctgttcttccagtgggtcggtggagaatccgggcgcgatgacaaactcatcttggctggtaagtacctgacgcaaaagaggatcgtccggattgcctttctccatgcgatcgataaaactgcggggcacacgcagggcaaaaagctttttggcgctgcgtccggctaacagtttttcctccgcgtctatattcaaaagacgcagaagttcatcaggatcggtcacaacatcggcaagttgcgttaaccaatcttctctggatggggtatttagggttacaatatgcgccattttgtggcttagctaccaattaacaaatttcagagggccttatggcaacgtactatagcaacgattttcgtgctggtcttaaaatcatgttagacggcgaaccttacgcggttgaagcgagtgaattcgtaaaaccgggtaaaggccaggcatttgctcgcgttaaactgcgtcgtctgctgaccggtactcgcgtagaaaaaaccttcaaatctactgattccgctgaaggcgctgatgttgtcgatatgaacctgacttacctgtacaacgacggtgagttctggcacttcatgaacaacgaaactttcgagcagctgtctgctgatgcaaaagcaattggtgacaacgctaaatggctgctggatcaggcagagtgtatcgtaactctgtggaatggtcagccgatctccgttactccgccgaacttcgttgaactggaaatcgttgataccgatccgggcctgaaaggtgataccgcaggtactggtggcaaaccggctaccctgtctactggcgctgtggttaaagttccgctgtttgtacaaatcggcgaagtcatcaaagtggatacccgctctggtgaatacgtctctcgcgtgaagtaatgcggttgtggtgcggcctgcaggctgcaccatcacttattcaggtcagagatgatgaaacgccttatcgttcttgttttgcttgccagcacgctgctcacgggctgtaacaccgctcgcggtttcggcgaagacatcaaacatctcggcaactccatctctcgcgctgccagctaatttttcttctcttccgaaaaatcatcagattcccatcatttttggcgatgttgtctattattaatttgctataggcaaacataaataacattacctaaaaggaagacgttatggtgaagaagacaattgcagcgatcttttctgttctggtgcttagtacagtattaactgcctgcaacaccacgcgtggcgttggtgaagacatttctgatggcggtaacgcgatttctggcgcagcaacgaaagcgcagcaataagcaataacggtacgacagctgtgtcgtgccgtttgttttttctgcgatagtcacaaaggtaatagttgaaattcccctgccacctggcaaaatatccgttcaaccatcagctttgcaggacgacctgcaaacgcctcttttcaccggggacggccccaattctccggagcctgatatgtcctggattatcttagttattgctggtctgctggaagtggtatgggccgttggcctgaaatatacccacggctttagtcgtttgacgccgagtgttattactgtgacggcgatgattgtcagtatggcgctacttgcctgggcgatgaaaagcttaccagtagggacggcttatgccgtgtggacgggtattggcgcagtcggcgcggccataaccggcattgtgctgctcggtgagtccgctaacccgatgcgcctggcgagtctggcgttaatcgtattggggattattggtctgaaactcagcactcattaactaccaggctgctgtacccaaataaatttactgacatcaaacccttcccgggtcgcgactgccagcatctcctgtttcacttcgtcagaaatggttggcgtgcgggagagtatccacaggtagtcgcggtccgggccgcaaaccagcgcatggcggtattcccgatcgagtgcaataacgttataaccgccatagaaaggaccaaagaaactcactttcagcgcagcgcgagttggtgcgccggtaaagtacgctttcccttcactctgctgccacattcctctgtcagggttatagcctttattaatgacattcaggccgccgtcatcacgcaggctgtatgttgcggtgactttttccagtccacgttcaaagcggtgatcaaaacgggcaatctcataccaggtaccgagataacgtttggcgtcgaaattatttactacggtcacgccacgcggcggcgtaggagaactgcaggcaacgaccagaaatgcagctgtcgctgcggcaacgagagggagcaggcgcataaatgtttccttactggtttttttctaagtgtagatgacagcaaggaaaagcggagaaaaggtccgaaaattcggacccgatggaattttactgtagagcgttaagaatctgccaggcggcgtcgactctcgctggattgggatagtttttgtttgccagcatcacgatacccagctctttttctggaataaacgcgacatagctaccaaatccgccggtcgcccctgttttatgtacccaacttgcgcgtactgcaggagttgggggcgtaatcgcttttacggggcgtgctgccagtgcaattttattgtcactgccgttaatgatgctgtcaggatttaccggccagtccagcatttcccagcccaggccctgatacatatcgccggtttgccagtagcgagattgtgccagttgtatcccttgttgaagcgttttctcattgatatcaaggggttttaaattgctttgcacccagcgggccatatcttcaatggtgctcttcacaccataagcttcagcatctaacgccccagggctaacatgcactgccttaccttcgcgatatccccaggcgtaattcttttcttctgcgggcggtacattaatccacgtatggttgagtttgagtggctggaagacacgagtttgcatcgcctgctcaaaactcaaaccagacggcttcacagccagtgcgccgaacaaaccgatactggagttggcatacagacgttgtgttcctggagcccatgcaggctgccagttttgatagaagcgcagcaagtcgctactggatttcacctcatccggcacctgcaatggcaggccgccagcagtgtaggttgcgagatgtaatagtgtgatcccattccactgtttagcggtaagttcaggccagtattttgttgtgggatcgcttaacttgatttcccctcgagcaatagcgtcgccaccaagcacgccagtaaatgttttgctgacgctacctaactcaaacaacgtttgctgtgtgacgggctgctttttggcgatgtccgcatagccccaggtaaagtaataaggtttaccctgataaattaccgccaccgccatacccgggatcttttgttgctctataagcggggtaattgtgcgatgcacaatatcgttgatttgttgaggggcagcaaatgtggagcaagaggcggtaattaataaggcgcagagcgtcgttttgaacatagggtctggtttccatacaaaacggcccgccataggcgggccggatttacattggcgatgcgttagattgtaacgacaccaatcagcgtgacaactgtcaggatagcagccagaccgtagaaaacccatttgcccgcaggtacgtggattttcagatcgtgcatcgcgtggtgcatacggtgtaaaccacaccacagcggcagaacgatcatcaggaacaggaatacgcgaccaatgaagctctgcgcgaacgccagaacgcgctcgtagctcagcgcatcacccggaaacaaccccagtggcagcagaatacccaccagcaggatcatcaccggcgcaatgatggcgctccacataccaccggccccgaagaggccccagaataccggttcgtcagaacgctttggatttggattaatcatctcaggctccttaccagtacagggcaacaaacaggattacgatggtggcaaccacagttaccgcccagagacttttgataattggctctggtcccattttttcgtcttttacaatgatattggccgctttcggtgccagttcaaaccaggttttggtgtgcagcagagctgccgccagagtgatcaggttaatgatcacgataaccgggttttgtaaaaagtcgacgaatcccgcccaggcttccgggccatttttcagggcaaacagcccgaaaatcagttcaatgctgaaccacacagccggaaccgccgtgccttcgcgcagcatgtaaaagcgataaaacggcaattttttccaccaggtggacgtcattggccgtacatacggtttacgtttagtcgtcatgttgcactccttagcgtggtttcagggtcgcgataagaaagtctttgctactttctactttgccctgctgaatggccgcagccggatcgacgtgtttcgggcagacttcggagcagtagcccacgaaagtacagctccatacgccgttctggctgttcaactgcgccatacgctccttcttaccgtggtcgcggctatcttcgttataacgatgcgccagcgtaatggcagccggaccgatgaactctgggttcaggccaaactgcgggcacgcggcgtagcacaaaccacagttgatgcaaccggagaactggtgatacttcgccatctgcgccggggtctggatgttagtaccctgatccgcggtgcgggagttgccgatgatgtacggtttgatcgcttccagactttcgatgaagtgggtcatatcgaccaccagatcgcgttcaatcgggaagttagctaacgcttcaaccttcataccgtcggtgtaatcacgcaggaaggttttacatgccagttttggcacgttgttaaccatcatgccgcaggaaccacaaatcgccatacggcaggaccagcggtagctcaggtccggtgccaggttgtctttgatgtagcccagcgcatccagtaaactggtagttgcgtcataaggcacttcatagaatgcgctatgcggtgcggtatcgacttccgggttatagcgcaccacctcaattttcaggtttttcatctcagccattcgccttctccttcttattggctgcttccgccttatcggctgcatccgcttcgccaccgtaaacgcgtttagctggcggcagcgtagtaatcttcacgtcgctgtactccaggcgagtcgtgccatcagcatcgcggaaggcgagggtgtgtttgaggaagttgacgtcgtcacgctcggtgcaaccttcgtccagacgctggtgcgcgccgcgggactctttacgtgccattgcggagtgcgccatacattcagcaacgttcagaccgtggcccagttcaatggtgtagagcaggtcggtgttgaacacgctggaagtgtcggtgatgcgcacgcgcttgaagcgttcctgcagctctgccagcttgtcgatggttttctgcatcagttccggcgtacggtagataccgcagccttcttccatagccaggcccatttcgtcgcggatcttcgcccagttttcgccgccatcctggttaaccagatctttcagacgttgttcaacgccagctgcctgcgcttcaattgccgcttcgttgccattaccggcagttgctgcacgctctgtcgcttgttcaccggccagacggccgaagaccaccagttccgccagggagttagaacccagacggtttgcaccgtgcagaccaacagaggaacattcacccacggcgaacagacctttaatgcgggtttcacagttctgatcggtttcgataccgcccatggtgtagtgtgcggtcggacgtaccggaatcggttctttaaccggatcgacgccaacgtacgctttcgccagttcgcagatgaacggcagacgttcatgcagttttttctcgccgaggtgacgcaagtcgagataaaccacatcgccacgcggcgtggagatggtgttgcctttacgccattcgtgccagaaggcctgagagactttgtcgcgtggacccagttccatatatttgtttttcggctcgcccagcggagtttccgggcccatgccgtaatcttgcagataacggtagccatttttgttgaccagaataccgccttcaccgcggcaaccttcggtcatcaggataccggaacctggcagaccggttgggtgatactgaacgaattccatgtcacgcagcggaacgccgtggcttagcgccatacccataccgtcaccggtaacgatgccgccgttggtgttgtaacgataaacgcgacccgcaccgccagtagccataacgaccgcgttagcacggatctgcaccagcgtgccttccatcatgttcattgctaccaggccgcgaacatgaccatcatcaaccagaatatccagcacgaaatgttcgtcaaaacgctggatctgcgggaattgcagagaggtctggaacagcgtgtgcagcatatggaagccggtcttatcggcggcgaaccaggtgcgctcgattttcatgccgccgaagcgacgtacgttgacgctaccatccgggcgacggctccatgggcatccccacagttccagttgggtcatttcggttgggcagtggtggacgaaataatccacgacatcctgctcacacaaccagtcgccacccgctactgtatcgtgaaagtgatattcgaagctgtcatgatcctgcgcgacagcggcggagcccccttctgcagcaacggtatggctacgcatcgggtatactttactgattagtgcgatttttgcattcggatttgcctgcgcggcagcaattgcagcacgtaatcccgcgccaccggcgcctacaatggcaagatcggcttgaaaggtttgcacgacattcctccagattgtttttatcccacagccacgtacttcagggtaagtacctgaaagttacggtctgcgaacgctattccactgctcctttataggtacaacagtatagtctgatggataagtctgaaatttgacgagatcgatttttttagtgcgcaagagggctaaattatcactgaagatgattaatttaattactaaaccatcagatcgtgctttttttagtcactgcccaccgctgtttgattcctgcgtaaaatttgtctcgccgtcgcgttgcgagtagacttcgtgcccttgtcaaaaactggagatttaactatgagcgaaacggcatcctggcagccgagcgcatccattcctaacttattaaaacgcgcggcgattatggcggagatccgtcgtttctttgccgatcgtggagtgctggaggtggagacgccttgtatgagccaggcgacggtaaccgatattcatttggtcccgtttgagacacgtttcgttggccccgggcatagccaggggatgaatctctggttaatgaccagcccggaataccatatgaaacgcctgctggttgccggttgtgggccggtattccagctgtgccgcagcttccgtaatgaagagatggggcgttatcacaaccctgagttcactatgctggagtggtatcgaccgcactatgatatgtaccggttgatgaacgaggtggacgatctcttacaacaggtgctggactgcccggcagcagaaagcctttcttatcaacaagctttcttgcgttatctggaaattgacccgctctctgccgacaaaacgcaactgcgggaagtcgcagcgaaactggatttgagcaatgttgctgataccgaagaagaccgcgacacgctgctacaattgctgtttacctttggcgtagagccaaatattggcaaagaaaaaccgacctttgtgtaccactttccagccagccaggcaagtctggcgcaaatcagtaccgaagatcatcgggtcgctgaacgctttgaggtttattataaaggtattgagctggcgaatggtttccatgaattgacggatgcccgtgagcagcaacaacgctttgaacaagataaccgtaagcgcgcggcgcgcggtttgccgcagcaccccattgaccagaatctgattgaagccttgaaagtcggtatgcctgactgttccggcgtggcattaggtgttgatcgtctggtgatgttggcgctgggcgcggagacactggctgaagtcatcgcctttagcgttgaccgggcataattctgaaaaattactgaattaacagcgaagaatggcgtgataagcgccattctgtagcatatgttttcatttttccgttaaaggccacaatttaagactggatatttgatatcatccaggtatcaattctgtattggtttttacgctgcctgctcaatgttgcgcagtgcagttcagtgggcacgtgttatacacgcgctgaaatgaaggatggtttcatgcctcacacgataaaaaagatgagtctgataggactcatattgatgatctttacttccgtatttggatttgccaatagcccaagcgcttattacttaatgggttatagtgcgattcccttttatatattttctgcattgttattctttattccattcgccttaatgatggctgaaatgggagctgcttatcgcaaagaagaaggcggtatctattcctggatgaataatagtgtcggaccacgttttgccttcattggtacgtttatgtggttttcctcttatatcatctggatggtgagtacctccgcgaaagtttgggtaccgttcagtacattcctctatggtagcgacatgacccagcactggcgtattgccggactggagcctacgcaggtggttggtctgctggctgtggcatggatgattctggtcaccgtcgttgcttctaaggggattaataaaattgcccgcattactgcggtgggcggtattgcagtaatgtgtctgaatttagtattgctgttagtaagcattactattttgttattaaatggtgggcatttcgcgcaggatattaatttccttgcaagtccgaacccgggttatcagtccggtctggcaatgctaagctttgtggtatttgccatttttgcctatggcggaattgaagcggttggtggtctggtcgataaaacggaaaatccagaaaagaactttgccaaaggtattgtttttgccgctattgttattagtatcggttatagcctggcaatatttttatggggcgtcagcacaaactggcagcaggtattaagtaatggttccgttaacctcggcaatattacctatgtgctgatgaagagccttgggatgacgctgggtaatgcactgcatttgagtcctgaagcgagtttgagcctgggcgtatggtttgcgcgtattactggacttagcatgttcctcgcctataccggtgcgttctttacgctttgctatagtccgttgaaagccatcatccaggggacgccgaaagcattgtggccggaaccgatgacgcgcctgaatgcgatggggatgccgtctatcgccatgtggatgcagtgcgggttggttactgtcttcatcctgctggttagctttggtggcggtaccgcaagcgcgttctttaacaagctgacgctgatggcgaacgtgtctatgacgcttccttacctgttcctcgcgctggctttcccgttctttaaagcacgtcaggatctcgacagaccgtttgtgattttcaaaacgcatttgagcgcaatgattgcgacagtggttgtcgtactggtggtgacatttgcgaacgtcttcaccatcattcaacctgtggttgaagccggagactgggacagcacattgtggatgattggcggccctgtcttcttcagcctgttagcgatggcgatttaccagaactattgcagcagagtggcaaaaaatccgcagtgggcggtggaataacccgatgccctatcgtctacctgacgatagggcgtaaagacaggaaatgttatggatgacaccagccgggacccggcaataaccgaagatgaaatcagggcgctgcaattttctgccggggatgtagcggaaatagagcagacgattctctcttttgtcgatgcctgccacacccgtaaagtggcgatggtggtgggtagcaccattaacaccctcaaagatcgcgatggtaaacggtggggaaacctgccggatatttattgcgcttatcttatccgatgtctggtttttcgcggggaattagtgggatacggcgatttgtttcgtatgcgctatagcgaaattaagcgaccggttaccttatgagtgcgcgcatgtttgtcttatgctgcatctggtttattgtggcgttcctctggataaccatcacttccgcgctggacaaagagtggatgattgatggacgcgggattaacaacgtctgcgatgtgttgatgtatctcgaagaagacgatacccgtgatgttggtgtgataatgacgttaccgctctttttcccttttctctggttcgctttgtggcgaaaaaaacgcggctggtttatgtacgccaccgcgctggctattttcggctactggctgtggcagttttttctgcgctatcagttttgtttgtgagccggattggttcatccggcacacaaacttacaaacttcccgcctgacgacctttgcccgcagacgtcagcgttctccccgtttgtttaccgttgaggctttccagacgcatctggaagggcgggaatggcatatcgataccgtgggcatggaagccagccagaatcagctggtggatctcatggcgtagcggcatacggtgacccatctcagcggcgtaaatacgcagctcgaaaatctgaatcccctgttgcagatccaccaggaagacttccggtgccgggttgtcgatcaccaggctgcagcgacgcgctgcggtgagcaggatttccgtcacttcttcgctattggcatcggcaggggccggtatcgtcaacaccacgcgcgtgacgctgtcagagaggctccagttgataaactgctcggtaataaacgccttgttcggcacgattatctctttacggtcccagtcgctgatggtggtggcgcgggtgttaattttcgtcacgctaccggtgagatcgcgaattgtcaccgtatcgccaatgcgaatcggtttttcgaacaggataatcagaccagagataaagttggcgaaaatttcctgcaaaccaaaaccgagaccaacaccgagcgcggcaaccagccactgcaatttgctccactcaataccaatcatactgaagccgaccagcccgccaatcagcatcagcagatatttggtgatggtggtgatggcgtaacccgtacccggcgttaaatccaggtgctgcaaaatcgccagttccagcagcgcgggcaagttgcgcaccagctgcgtggtgatgataaacaccagaatggcaatcagcaccgcaccgagggtaattggctccagactttctacgccctgtaccgtggaggtgacatcccacaggctaatattttcgaggaagccgaaagcggaatggatttcactccacagcacaatgacagaaagcagggcgatcaacatcaaaatactgcgcaccagccgcaaggattgcgcactgatggcatcgagatcgacttcgctttcatcgacttcaattgctccttccgggctactgtgatgatgcgcttcctcttcgccacgcgcacgttgcgctaacatctctgcccggcgatgcttcgcccgatcaaacgccagcctgcggcgctggatcagcatccagcggcggataacgtgataaaccaccagtagcaggaaccagatggcaacgctggtttcaagcctcgctaacagcgcctgtgccgttgccagataacccaccgcgctcgccagaatggcaaccaacggcgcgccaatcatcatgttccacagcatatggttggtaatgttgtcgccgctgccctctttgttgagatacagcggaatcccggcctttttcaggctgagggtgaccaccgccagcgcaccgcaaatgaggataaagcaaagccgtcccaggctaccggagaattcacggtcgtcgaggttatcgaacatcatcagcgccataatcagcggcacaataagcccgatgctcatcaggtagtagcgcatcccacgggaaacacgttcgcgcggccagccaaaatgagcgataaacaagccgttcgggcgggcaaaggtggcgcaaatcatcactacccacagcagcggcacggtggccgttacaccatcgccaatcgcgaccgccagcggataaggccacgcctcgcgcaagccgtaacccagcgtcatccacagcaccggtaacggactcgcgacgagaatgctccagaaaagagtgcgcaacgtcagccagaagtgatcctgagtcactttgccaactttcgccgcgctacgttcaagaaaacgggtgaaatagcggcggctgtaaatactgcaaccgaccagaatcaacgcgccaaacagcggcaaaattgtctctttgctggtcagcatcatcacactggctttgcccaactgactgaaggtgtccaggctaatgagacgacgcagatcctgggcgatttccagcggccaggcgatggtcatcgggcgcacgtcagaggtccagaacagatagcggtgcgttgcttcgttcacctctttcagcgcatcctccagttgcccgttggagactttcagcttggtcagttccaatagtagcgtgtcgccaccctgcaacaaactgttcagcaactcacgctgagtgcgcagttgtgcttccagaatacggttttgctcggcagtcagcggctgaccgtcggcctgatgaatttgccgtagcagcggctgtttattaagcagatcctcataacgtaaccgttgcacacgcaactgcgccatttcggtatcaagctgttgtggtttcggcatttccggcagccgtgccacctgcgcccgcagcgcttcgccgagcagattggagcttcccagccattggctctgttcacgcagcgtattcaacgcctgccggacctgtaacgtctggctggcagcctgacgctgttggctggcaacgagatccatccgctgcgcctgttgattcaaagccgcgcttagttcgcggttaattttgaattgcgcgacgatatctttcggcaaatcggcgctgttttctgccagcaattcggtactttccagcgcccgctccgcctcaagctgacgttggctgtttaattgattacgcaaggcctgcaaatacgcatccagttgctggctctctttttccgccagctcactgcgtaagcgcgctaattcctggcggttattggcagacagctgcgccagctccagttcatcaacgagcgccttaagacgtgcagagtcagactgcaacgcgaaattttgtgcctgattgagcggagtattgccggtaagcgttcccaggcggcgctcgatctcatttaactgacggcgggcgtcggtttgctgttgcggcagttgattcaggctatcggcaatctcgcgggcgcgctcctgctcttgctgggcctgacggcttttatccagcaactggctgctgacctggagaatttcctgattcagcgcgtcggtagacattcccgggctcacgctgcgcggctcgtcacgcatgttgtttaattgtgcgcgcagagtagcggagagtttcggataattatcgataacttgctgatattgtttgatgcgctcaagggaaccttttcgttcctcaagcgcatttaaggcagactggagcgcctctacgacttccggctgtgcgggtttcgccgcttttgcctgctccagttcctgagtgatttgtttgctatcgggggccgtcgcggcgtacgccccccaactgaggcaccaggccatcagaaaagtgataatcaggcgcacgtcagcgtttcctttgatggattagacctggtcttttttgtcgtcaaccaatgggctggcgtcgtgttctgcttcgatctcttcagcaggaagcggggcaggttcagcgtctggcgtaacaaaggtttcggtagatactgccagcggctggccaattttcgtgacagacaggctttccagttgctcaaccagattcactttacccggtgcaaacaggttgataacggtggaaccgagtttaaagcgacccatttcctggcctttcagcagtgccacagaaccgtcgttttccccggcaggccaggtccagcgcttgatgataccttcgcgcggcggcgtaatggtgcccgcccagaccgtctcaatgctgccaacaatcgtcgctccgaccagaatctgcgccattgggccaaattcggtatcgaaaaggcaaatcacgcgttcgttacgggcaaacagattcggcacgttctgagccgtgagatggttaacggagaagagatcgcccggcacgtagatcatctcacgcagaataccgttgcacggcatgtgtacgcggtggtagtcacgcggggagaggtaagtggtcacaaacgtaccgttgcggaacaggtccgccatcagatagttgcctgccagcagggcttcgaggctgtagttgtggcctttggcttgcaggattttatcttcttcgattttacccaactggctgataacgccatcggcaggcatgaccagtacattcggatcggtatcgattgggcgtacttcgtcacgcagcggacggacaaagaattcgttaaaggtgcggtagctggcggtgtccggcttttgcgcctctttcatgtcgaccttgtagtatttaacgaacagatcgataaccagttttgtcagccatcctgcccgcttgcttgcgccccaacccgccaggcgagtaagccatagtttcggcagaatgtactgtaggctaagtttaaaactatttaacaaggtagcctccaggccattgttttgtcgttcctgatccggcctacatgccggatcctgaaaaaaaggggacgattctaacgacggttagcttaattgtcagtcatccgtatcagaaaagtttttacgcgtttttacctgcgccatgctttccagaatacggtgatagttttcgaaacgggtttccgcgattttcccttcctcaaccgcttcccggatagcgcagcccggatcggtatcgtgtttgcaatcgcgatatttacacagacctaaatagtcatggaattcgacaaagccctgagtgatttgttccggctccaggtgccagaggccgaactcacgcactcctggggagtcaatcacatcaccgccgtgcgggaagtgatacagccgagcggcggtcgtggtgtgctgaccgagcccgctgttgtcagagatatcgttggtcaggatctctttttgcagccccagcaacgcattcagcaggctggatttgccgacgccagactgcccggcaaaaatgctgatgcgcccggtcaacgcctcttccagcggttttagcccatcctgagtatggctggaaaccatcaatacgcgataaccgatattgcggtagatatccatctgctcgttgacgaacgccatgccttcgtcgtccagcaggtctatcttgttgagcacaataatcggctcaatctgcaaggtttcgcaggccaccaggtaacggtcgataatattgaggctcagctccggcaaaatggcggagacaatgacaatctggtcgatgttggcggcaataggttttacgccgtcgtagaaatccggacgcgtcaacacgctggtacgctcatgcaccgcttccacgatccctttgacatttacgccttccgccgccggtttacccggacgccagactacgcggtcgccggttaccaggctacggatggtacggcgaatattgcagcggtgaacgtcgccatcggcggattccacatcagcgtgcataccaaagcggctgatgacgataccttcatcaggctcgccaaacagattgtcgtcgtagtcgggcttctccttagacgttttaagacgacgctggtgattggcgttcacgcggcgctgctggcctttggagagtttatttttactcaatcgtacagactcctggtcgcccctgatgggcaaaacatctatgatacacgcaattgtggatcaatatagtcactgtgaatgggtggaaaatagcatgagtgccaatgaaaacaacctgatttggatcgatcttgagatgaccggtctggatcccgagcgcgatcgcattattgagattgccacgctggtgaccgatgccaacctgaatattctggcagaagggccgaccattgcagtacaccagtctgatgaacagctggcgctgatggatgactggaacgtgcgcacccataccgccagcgggctggtagagcgcgtgaaagcgagcacgatgggcgatcgggaagctgaactggcaacgctcgaatttttaaaacagtgggtgcctgcgggaaaaagcccgatttgcggtaacagcatcggtcaggaccgtcgtttcctgtttaaatacatgccggagctggaagcctacttccactaccgttatctcgatgtcagcaccctgaaagagctggcgcgccgctggaagccggaaattctggatggttttaccaagcaggggacgcatcaggcgatggatgatatccgtgaaagcgtggcggagctggcttactaccgcgagcattttatcaagctgtaaaatttttcctggtcacgtaagcgccggaatccacttgcggcggcgtgattttgacgctaaattgaacgtcttgctgataatttcagcacttgagataaaaacgcaaaaaaaacttttttggggggttgcagagggaaagatttctcgtataatgcgcctcccgtaacgacgcagaaatgcgaaaattacgaaagcaaaattaagtagtacgcgggaatagctcagttggtagagcacgaccttgccaaggtcggggtcgcgagttcgagtctcgtttcccgctccaaaatttgaaaagtgctgcaaagcacagaccacccaagcgggaatagctcagttggtagagcacgaccttgccaaggtcggggtcgcgagttcgagtctcgtttcccgctccaaaatttgaaagtgctgtaaggcacagaccacccaagcgggaatagctcagttggtagagcacgaccttgccaaggtcggggtcgcgagttcgagtctcgtttcccgctccaaattcttctctcaataaaatatccacagcgacgcgatgcgttattgctggtttttgttgtctctgacaaactcttgtaaacagagttatccacagcctcaggctgtaatcttaatttcaaagaaacttcgcacggtgaatagtatttttttaacctattgatagataagttaaaaattaagattccgttttgtcgagtcgatcacttgacgattttattcgtcttgaattgcaatgcgtttttatttttattcacaagctgtggatgaatcaggcgtcacgcggtaaccctttttcaatcacccgaaccagacgctgttttttcggcaattgcacttcgactatgcacgcatttcgtctctctatttgctgcgcaatcgcccacgctatgtgctcatcgagaagtgggtgctcacctttacgactttccagcgctgtcaaaatcgtttcatcccaaggggcattgcctaatgctacggcgatattacgcagccaacgcaggtgaccaatacgacgaatcgcgcttccttccgtgacttttaaaaacttctcttcgctccaggcgaataactcaatgagttccggtgcgtgtagcggcttacgcgggctgaaatcctcttctgtggtgagttgactatagcgattccacgggcagataagctggcagtcatcgcaaccgtaaatacggtttcccattaacggtcgcaactcttccgggatcgccccttcaagttcgatggtgagataagagatacagcggcgagcatcgacggtatatggctcgacgatggcaccggtcgggcaaatcgtcatacaggccacgcatttgccgcatccttcctcgactggttgatccacgggcagcggaatatcgaccagcaattcgcctaaaaagaagaagctaccggcctcgcgattgaggataagactgtgcttacctgtccagccgagcccagctttttcagctaacgggcgctcgagaataggcgcagaatcgacaaacggtctaaaattcaggctaacacaatgttgctgaatcatctcgcccagctttttgagtcggttgcgcagaagtttgtgatagtcacggcccagcgcataacggctaacatagccgagtttggggtttttcagcgtgctggcaaatgcggcgttagcaggaaggtaattcatccgcacgctgatcacgcgcagcgtaccgggcaataactcatgagggcgagcgcgcagcataccgtgacgtgccatccagtccatttcgccgtggtattgtttgtccagccatgcttgcagtttgggctcggactcgctgagatcggtatcggtaatacctacctgctgaaagcccagttccagcccccactgtttaattttttgcgctaactgattgagatcgaggggctcactcatgacggaccatacaatgaagaaaaaccccgtaagtataccacacaccgtctggtacgccgacgatatccgccgcggagaacgcgaggcggcagatgtgctggggctcacactctatgagctgatgcttcgcgctggcgaggccgcattccaggtgtgtcgtagcgcgtatcctgacgcccgccactggctggtgctgtgcggtcatggtaataacggcggcgatggctacgtggtcgcgcgactggccaaagcggtcggcattgaggtcacgttgttggcccaggagagcgacaaaccgttgccggaagaggccgcgctggcacgcgaagcatggttaaacgcgggtggcgagatccatgctagcaatattgtctggcccgaaagcgtagatctgattgttgatgcgctgctcggtaccggtttgcggcaagcgccccgcgaatccattagccagttaatcgaccacgctaattcccatcctgcgccgattgtggcggttgatatcccttccggcctgctggctgaaactggcgctacgccaggcgcggtgatcaacgccgatcacaccatcacttttattgcgctgaaaccaggcttgctcactggaaaagcgcgggatgttaccggacaactgcattttgacagtctggggctggatagttggctggcaggtcaggagacgaaaattcagcggtttagtgcagaacaactttctcactggctaaaaccgcgtcgcccgactagccataaaggcgatcacgggcggctggtaattatcggtggcgatcacggcacggcgggggctattcgtatgacgggggaagcggcgctgcgtgctggtgctggtttagtccgagtactgacccgcagtgaaaacattgcgccgctgctgactgcacgaccggaattgatggtgcatgaactgacgatggactctcttaccgaaagcctggaatgggccgatgtggtggtgattggtcccggtctgggccagcaagagtgggggaaaaaagcactgcaaaaagttgagaattttcgcaaaccgatgttgtgggatgccgatgcattgaacctgctggcaatcaatcccgataagcgtcacaatcgcgtgatcacgccgcatcctggcgaggccgcacggttgttaggctgttccgtcgctgaaattgaaagtgaccgcttacattgcgccaaacgtctggtacaacgttatggcggcgtagcggtgctgaaaggtgccggaaccgtggtcgccgcccatcctgacgctttaggcattattgatgccggaaatgcaggcatggcgagcggcggcatgggcgatgtgctctctggtattattggcgcattgcttgggcaaaaactgagcccgtatgatgcagcctgtgcaggctgtgtcgcgcacggtgcggcagctgacgtactggcggcgcgttttggaacgcgcgggatgctggcaaccgatctcttttccacgctacagcgtattgttaacccggaagtgactgataaaaaccatgatgaaagcagtaattccgctccctgaataaggaagtgactgataaaaaccatgatgaatcgagtaattccgctccctgatgagcaggcaacattagacctgggcgagcgggtagcgaaagcctgcgatggcgcaaccgtaatctatctgtatggcgatttaggcgcaggtaaaaccacctttagccggggctttttacaggctctgggtcatcagggtaatgtcaaaagccccacttatacgctggtcgaaccctatacgctcgacaacttaatggtctatcactttgatttgtaccgccttgccgatcccgaggagctggagtttatggggatccgcgattattttgccaacgatgccatctgcctggtggagtggccacaacaaggtacaggtgttcttcctgacccggatgtcgaaatacacattgattatcaggcacaaggccgtgaggcgcgcgtgagtgcggtttcctctgcgggtgaattgttgctggcgcgtttagccggttaacctttgaaaggtggcgggatgatgtatcgcatcagaaattggttggtagcgacgctgctgctgctgtgcacgccggtgggtgccgcgacgctctctgatattcaggtttctaacggtaatcaacaggcgcggataacgttgagttttattggcgatcctgattatgcgtttagccatcaaagcaaacgcaccgtggcgctcgatatcaaacaaacgggcgtgattcagggactgccgttgttgttcagcggcaataatctggtgaaggcgattcgctctggaacgcctaaagatgcacaaacgctacggctggtggtcgatcttaccgaaaacggtaaaaccgaagcggtgaagcggcagaatggcagcaattacactgtcgtctttacgattaacgccgatgtgccgccaccgcctcctccgccgcccgtggttgcgaaacgcgttgaaacgcctgcggttgtcgcaccgcgcgtcagcgaaccggcgcgcaatccgtttaaaacggaaagtaaccgcactacgggtgttatcagcagtaatacggtaacgcgtccggcagcgcgcgcgacggctaacactggcgataaaattatcatcgctattgatgccggacacggcggtcaggaccctggcgctatcggccccggtggtacgcgggagaaaaatgtcaccatcgccatcgcgcgtaaattgcgtactttgctcaatgacgatccgatgtttaaaggcgttttaacccgtgacggggattactttatcagcgtgatggggcgcagtgatgtggcacgtaagcaaaacgccaatttcctcgtgagcattcacgctgatgccgcaccgaaccgcagtgcgactggcgcttccgtatgggtgctctctaaccgtcgcgccaacagtgaaatggccagctggctggagcagcacgagaaacagagcgagctgctgggtggggcgggtgatgtgctggcgaacagtcagtctgacccctatttaagccaggcggtgctggatttacagttcggtcattcccagcgggtagggtatgatgtagcgaccagtatgatcagtcagttgcaacgcattggcgaaatacataaacgtcgaccagaacacgccagccttggcgttctgcgcagcccggatatcccaagtgtactggtcgaaaccggttttatcagcaacaacagcgaagaacgtttgctggcgagcgacgattaccaacaacagctggcagaagccatttacaaaggcctgcgcaattacttccttgcgcatccgatgcaatctgcgccgcagggtgcaacggcacaaactgccagtacggtgacgacgccagatcgcacgctgccaaactaaggacgattgatgccaattcaggtcttaccgccacaactggcgaaccagattgccgcaggtgaggtggtcgagcgacctgcgagcgtagtcaaagaactagtggaaaacagcctcgatgcaggtgcgacgcgtatcgatattgatatcgaacgcggtggggcgaaacttatccgcattcgtgataacggctgcggtatcaaaaaagatgagctggcgctggcgctggctcgtcatgccaccagtaaaatcgcctctctggacgatctcgaagccattatcagcctgggctttcgcggtgaggcgctggcgagtatcagtagcgtttcccgcctgacgctcactagtcgcaccgcagaacagcaggaagcctggcaggcctatgccgaagggcgcgatatgaacgtgacggtaaaaccggcggcgcatcctgtggggacgacgctggaggtgctggatctgttctacaacaccccggcgcggcgcaaattcctgcgcaccgagaaaaccgaatttaaccacattgatgagatcatccgccgcattgcgctggcgcgtttcgacgtcacgatcaacctgagccataacggtaaaattgtgcgtcagtaccgcgcagtgccggaaggcgggcaaaaagaacggcgcttaggcgcgatttgcggcaccgcttttcttgaacaagcgctggcgattgaatggcaacacggcgatctcacgctacgcggctgggtggccgatccaaatcacaccacgcccgcactggcagaaattcagtattgctacgtgaacggtcgcatgatgcgcgatcgcctgatcaatcacgcgatccgccaggcctgcgaagacaaactgggggccgatcagcaaccggcatttgtgttgtatctggagatcgacccacatcaggtggacgtcaacgtgcaccccgccaaacacgaagtgcgtttccatcagagccgtctggtgcatgattttatctatcagggcgtgctgagcgtgctacaacagcaactggaaacgccgctaccgctggacgatgaaccccaacctgcaccgcgttccattccggaaaaccgcgtggcggcggggcgcaatcactttgcagaaccggcagctcgtgagccggtagctccgcgctacactcctgcgccagcaagtggcagtcgtccggctgccccctggccgaatgcgcagccaggctaccagaaacagcaaggtgaagtgtatcgccagcttttgcaaacgcccgcgccgatgcaaaaattaaaagcgccggaaccgcaggaacctgcacttgcggcgaacagtcagagttttggtcgggtactgactatcgtccattccgactgtgcgttgctggagcgcgacggcaacattagtcttttatccttgccagtggcagaacgttggctgcgtcaggcacaattgacgccgggtgaagcgcccgtttgcgcccagccgctgctgattccgttgcggctaaaagtttctgccgaagaaaaaagcgcattagaaaaagcgcagtctgccctggcggaattgggtattgatttccagagtgatgcacagcatgtgaccatcagggcagtgcctttacccttacgccaacaaaatttacaaatcttgattcctgaactgataggctacctggcgaagcagtccgtattcgaacctggcaatattgcgcagtggattgcacgaaatctgatgagcgaacatgcgcagtggagtatggcacaggccataaccctgctggcggacgtggaacggttatgtccgcaacttgtgaaaacgccgccgggtggtctgttacaatctgttgatttacatccggcgataaaagccctgaaagatgagtgatatcagtaaggcgagcctgcctaaggcgatttttttgatggggccgacggcctccggtaaaacggcgttagccattgagctgcgtaaaattttaccagtagagttgataagcgttgattctgcccttatttacaaagggatggatatcgggacggcgaagccgaacgctgaagagttactcgccgcgccgcaccgattgctggatattcgcgatccgagccaggcttacagcgctgctgattttcgccgcgatgcgctggcggaaatggccgatatcaccgcggcggggcggatcccactgttagtgggcggtacgatgttgtatttcaaggcattgctggaagggttgagcccgctaccgagcgcagacccggaagtacgggccagaattgagcaacaggcggcagagcaaggttgggagagtttgcatcgtcaacttcaggaggtagatccggttgcggcagcaaggattcatccaaatgatccacaaaggctttcccgggcactggaagtttttttcattagcggtaaaactttaacggaactgacgcaaacgagtggagacgctctaccgtatcaggtgcatcagttcgccatcgccccggcgagccgtgaactgctccatcaacgcattgagcagcgttttcatcagatgttggctagtggttttgaagcagaagtccgggcgctttttgcccgaggagatttgcatacggacttgccttccattcgttgcgtgggttatcgccagatgtggtcttaccttgaaggcgaaatcagttacgatgaaatggtttatcgaggtgtttgcgccacgagacagttggcgaagcggcagataacctggctgcgtggttgggaaggggttcactggcttgacagtgaaaaaccagaacaggcgcgtgacgaagtattacaggttgttggtgctatcgcaggctgaatgtgtacaattgagacgtatcgtgcgcaattttttcagaatcgaaaggttcaaagtacaaataagcatataaggaaaagagagaatggctaaggggcaatctttacaagatccgttcctgaacgcactgcgtcgggaacgtgttccagtttctatttatttggtgaatggtattaagctgcaagggcaaatcgagtcttttgatcagttcgtgatcctgttgaaaaacacggtcagccagatggtttacaagcacgcgatttctactgttgtcccgtctcgcccggtttctcatcacagtaacaacgccggtggcggtaccagcagtaactaccatcatggtagcagcgcgcagaatacttccgcgcaacaggacagcgaagaaaccgaataaggtttcgggctgtttttttacacggggagccagcgatcctgcgttccccgctgatctatttagagggttatacgcttgtttgaccgttatgatgctggtgagcaggcggtactggtacacatctattttacgcaagacaaagatatggaagacctccaggagtttgaatctctggtctcttccgccggtgtcgaagcattgcaggtgattaccggtagccgtaaagcgccgcacccaaagtattttgtaggtgaaggtaaagcagttgaaattgcggaagctgtcaaagcgacgggtgctagcgtcgttctttttgaccatgccctgagcccggcgcaagagcgtaacctggagcgtttgtgcgagtgtcgtgttatcgaccgcaccggccttattttagatattttcgcccaacgtgcgcgtacccatgagggtaagttgcaggttgagctggcgcagctgcgccatctggctacgcgcctggtgcgtggctggacccaccttgaaagacagaaaggcgggataggtttgcgtggtccgggtgaaacccagctcgaaaccgaccgtcgtttgttgcgtaatcgcatcgtgcagatacagagccgcctggaaagagttgaaaagcagcgtgagcaggggcggcaaagccgtatcaaagccgacgttcctactgttagcctggtgggatataccaacgccggtaaatctacccttttcaatcgcatcaccgaagcgcgggtctacgcggcagaccagttgtttgccaccctcgacccgacgttgcggcgtattgacgttgcagatgtcggtgaaaccgtacttgcagataccgtagggtttattcgccacctgccgcacgatctggtggcggcatttaaagccacgttacaagagacgcggcaagccacattactgctgcacgtcattgatgcggcggatgtgcgtgtacaagaaaacatcgaagcggtgaatacggttcttgaagagatcgacgctcacgagatcccaaccctgctggtgatgaacaagatcgatatgctggaagatttcgaaccgcgtattgatcgggacgaagagaacaaaccgaaccgtgtctggctttccgcacagaccggagcggggataccacagctttttcaggctttgacggagcggctttccggcgaggtggcgcagcatacattgcgtctgccaccgcaggaagggcgtctgagaagtcgtttttatcagcttcaggcaatagaaaaagagtggatggaggaggacggcagcgtaagtctgcaagttcgtatgccgatcgttgactggcgtcgcctctgtaaacaagaaccggcgttgatcgattacctgatctaacggcgtagcgtctgaagcgtggagtcatatcctctggcgtcgaaagacaacagggatcaccgcataacaaatatggagcacaaacatggcgtggaatcagcccggtaataacggacaagaccgcgacccgtggggaagcagcaaacctggcggcaactctgagggaaatggaaacaaaggcggtcgcgatcaagggccacctgatttagatgatatcttccgcaaactgagcaaaaagctcggtggtctgggcggcggtaaaggcaccggatctggcggtggcagtagtagccaaggcccgcgcccgcagcttggcggtcgtgtcgttaccatcgcagcggcagcgattgtcattatctgggcggccagtggtttctataccattaaagaagccgaacgcggcgtggtaacacgctttggtaaattcagccatctggttgagccgggtctgaactggaaaccgacgtttatcgacgaagtcaaaccggtgaacgtggaagccgtgcgtgaactggccgcttctggtgtgatgctgacgagcgacgagaacgtagtgcgcgttgagatgaacgtgcagtaccgcgtcaccaatccggaaaaatatctgtatagcgtgaccagcccggatgacagcctgcgtcaggctaccgacagcgccctgcgtggagttatcggtaaatacaccatggaccgcattctgacggaaggtcgtaccgtgattcgtagcgatactcagcgcgaactggaagagacgattcgtccgtatgacatgggtatcacgctgctggacgtcaacttccaggctgctcgtccgccggaagaagtaaaagcggcgtttgacgatgcgattgccgcgcgtgaaaacgaacagcaatacattcgtgaagcagaagcgtataccaacgaagttcagccgcgtgcgaacggtcaggcgcaacgtatcctcgaagaggcgcgtgcgtacaaggcccagaccatcctggaagctcagggtgaagtggcgcgctttgctaaacttctgccggaatataaagccgcgccggaaattactcgcgagcgtctgtatatcgagacgatggaaaaagtgttgggtaacacccgcaaagtgctggttaacgataaaggtggcaacctgatggttctgccgttagaccagatgctgaaaggtggtaacgcccctgcggcgaagagcgataacggtgccagcaatctgctgcgtctgccgccagcctcttcctccacaaccagtggagcaagcaacacgagctccaccagtcagggcgatattatggaccaacgccgcgccaacgcgcagcgtaacgactaccagcgtcagggggaataacgatgcgtaagagtgttatcgcgattatcatcatcgtgctggtagtgctttacatgtctgtctttgtcgtcaaagaaggtgagcgcggtattacgctgcgttttggtaaggtactgcgtgacgatgacaacaaacctctggtttatgagccgggtctgcatttcaagataccgttcattgaaacggtgaaaatgctcgacgcacgtattcagaccatggacaaccaggccgaccgctttgtgaccaaagagaagaaagacctgatcgtcgactcttacatcaaatggcgcatcagcgatttcagccgttactacctggcaacgggtggtggcgacattagccaagcggaagtgctgttgaaacgtaagttctctgaccgtctgcgttctgaaattggtcgcctggacgtgaaagatatcgtcaccgattcccgtggtcgtctgaccctcgaagtacgtgacgcgctgaactccggttctgcgggtacagaagatgaagttactaccccggcggcagataacgccattgccgaagcggcagagcgcgtaacggctgagacgaagggcaaagttccggtcatcaacccgaacagtatggcggcgctgggtattgaagttgtcgatgtgcgtatcaagcagatcaacctgccgaccgaagtgtctgaagcgatctacaaccgtatgcgcgccgagcgtgaagcggtagcgcgtcgtcaccgtagtcaaggtcaggaagaagcggaaaaactgcgcgcgactgccgactatgaagtgaccagaacgctggcagaagctgagcgtcagggccgcatcatgcgtggtgaaggcgatgccgaagcagccaaactgtttgctgatgcattcagtaaagatccggacttctacgcattcatccgtagcctgcgtgcttatgagaacagcttctctggcaatcaggacgtgatggtcatgagcccggatagcgatttcttccgctacatgaagacgccgacttccgcaacgcgttaatataacgactgcggtacaggtcaataaagccaccgcatcctcagggatgtcggtggttttctttttctataaggataatgaatgaatagcacaatctggctggcgcttgccctggttttggtactggaaggtttagggccgatgctttacccgaaggcatggaagaagatgatctctgcgatgaccaatttgcccgataatattttacgtcgttttggcggtggacttgtggttgcgggcgttgtggtctactacatgttgaggaaaacgattggctgaacaaaaaacagactgatcgaggtcatttttgagtgcaaaaagtgctgtaactctgaaaaagcgatggtagaatccatttttaagcaaacggtgattttgaaaaatgggtaacaacgtcgtcgtactgggcacccaatggggtgacgaaggtaaaggtaagatcgtcgatcttctgactgaacgggctaaatatgttgtacgctaccagggcggtcacaacgcaggccatactctcgtaatcaacggtgaaaaaaccgttctccatcttattccaagtggtattctccgcgagaatgtaaccagcatcatcggtaacggtgttgtgctgtctccggccgcgctgatgaaagagatgaaagaactggaagaccgtggcatccccgttcgtgagcgtctgctgctgtctgaagcatgtccgctgatccttgattatcacgttgcgctggataacgcgcgtgagaaagcgcgtggcgcgaaagcgatcggcaccaccggtcgtggtatcgggcctgcttatgaagataaagtagcacgtcgcggtctgcgtgttggcgaccttttcgacaaagaaaccttcgctgaaaaactgaaagaagtgatggaatatcacaacttccagttggttaactactacaaagctgaagcggttgattaccagaaagttctggatgatacgatggctgttgccgacatcctgacttctatggtggttgacgtttctgacctgctcgaccaggcgcgtcagcgtggcgatttcgtcatgtttgaaggtgcgcagggtacgctgctggatatcgaccacggtacttatccgtacgtaacttcttccaacaccactgctggtggcgtggcgaccggttccggcctgggcccgcgttatgttgattacgttctgggtatcctcaaagcttactccactcgtgtaggtgcaggtccgttcccgaccgaactgtttgatgaaactggcgagttcctctgcaagcagggtaacgaattcggcgcaactacggggcgtcgtcgtcgtaccggctggctggacaccgttgccgttcgtcgtgcggtacagctgaactccctgtctggcttctgcctgactaaactggacgttctggatggcctgaaagaggttaaactctgcgtggcttaccgtatgccggatggtcgcgaagtgactaccactccgctggcagctgacgactggaaaggtgtagagccgatttacgaaaccatgccgggctggtctgaatccaccttcggcgtgaaagatcgtagcggcctgccgcaggcggcgctgaactatatcaagcgtattgaagagctgactggtgtgccgatcgatatcatctctaccggtccggatcgtactgaaaccatgattctgcgcgacccgttcgacgcgtaattctggtacgcctggcagatattttgcctgccgggcgaacagtgtgatacattgctgtgtcgggtaagccattacgctatccgacacagtgttaaatcctcgcttttttccttccccgaactgaaataaattagcgacacagcttgtggctggtttatcatcaatataaatgtattttttcccgatttcccttttgaggttgatgtgcagttaacgagtttcactgattacggattacgtgcgctgatctacatggcgagtttgccagaagggcggatgaccagtatttctgaagtgactgacgtctacggcgtctcccgtaatcatatggtcaaaataatcaatcaacttagtcgtgccggctacgtgactgctgttcgtggaaaaaatggcggcattcgcctgggtaaaccggcgagtgcgatacgtattggtgatgtggtgcgcgagctggagcccttaagcctggtgaattgcagcagtgagttttgccacattacacctgcctgtaggttgaaacaggcactttctaaggccgtgcaaagttttcttacggaactggataactacacgcttgccgatttggttgaagagaatcaaccgctttataaattattgctggtggagtgacgaaaatcttcatcagagatgacaacggaggaaccgagatgagtcaagatcctttccaggaacgcgaagctgaaaaatacgcgaatcccatccctagtcgggaatttatcctcgaacatttaaccaaacgtgaaaaaccggccagccgtgatgagctggcggtagaactgcacattgaaggcgaagagcagcttgaaggcctgcgtcgccgcctgcgcgcgatggagcgcgatggtcaactggtcttcactcgtcgtcagtgctatgcgctgccggaacgcctcgacctggtgaaaggtaccgttattggccaccgtgatggctacggctttctgcgggttgaagggcgtaaagatgatttgtatctctccagcgagcagatgaaaacctgcattcatggcgatcaggtgctggctcagccgctgggtgctgaccgtaaaggtcgtcgtgaagcgcgtattgtccgcgtactggtgccaaaaaccagccagattgttggtcgctactttaccgaagcgggcgtcggctttgtggttcctgacgacagccgtctgagcttcgatatcttaatcccgcccgatcagatcatgggcgcgcggatgggctttgtggtcgtagtcgaactgactcagcgtccgactcgccgcaccaaagcggtgggtaaaatcgtcgaagtgctgggcgacaatatgggcaccggcatggcggttgatatcgctctgcgtacccatgaaattccgtacatctggccgcaggctgttgagcaacaggttgccgggctgaaagaagaagtgccggaagaagcaaaagcgggccgtgttgatctgcgcgatttaccgctggtcaccattgatggcgaagacgcccgtgactttgacgatgcagtttactgcgagaaaaaacgcggcggcggctggcgtttatgggtcgcgattgccgacgtcagctactatgtgcgtccgagtacgccgctggacagagaagcgcgtaaccgtggcacgagcgtgtacttccctagccaggttatcccgatgctgccggaagtgctctctaacggcctgtgtagcctcaacccgcaggtagaccgcctgtgtatggtgtgcgagatgacggttagcagcaaaggccgcctgacgggctacaaattctacgaagcggtgatgagctctcacgcgcgtctgacctacaccaaagtctggcatattctgcagggcgatcaggatctgcgcgagcagtacgccccgctggttaagcatctcgaagagttgcataacctctataaagtgctggataaagcccgtgaagaacgcggtgggatcagttttgagagcgaagaagcgaagttcattttcaacgctgaacgccgtattgaacgtatcgaacagacccagcgtaacgacgcgcacaaattaattgaagagtgcatgattctggcgaatatcagcgcggcgcgtttcgttgagaaagcgaaagaaccggcactgttccgtattcacgacaagccgagcaccgaagcgattacctctttccgtagtgtgctggcggagctggggctggaactgccgggcggtaacaagccggaaccgcgtgactacgcggagctgctggagagcgttgccgatcgtcctgatgcagaaatgctgcaaaccatgctgctgcgcagcatgaaacaggcgatttacgatccagaaaaccgtggtcactttggcctggcattgcagtcctatgcgcactttactagcccgattcgtcgttatccagacctgacgctgcaccgcgccattaaatatctgctggcgaaagagcaggggcatcagggcaacaccactgaaaccggcggctaccattatagcatggaagagatgctgcaactgggtcagcactgtagcatggcggaacgtcgtgccgacgaagcaacgcgcgatgtggctgactggctgaagtgtgacttcatgctcgaccaggtaggtaacgtctttaaaggcgtaatttccagcgtcactggctttggcttcttcgtccgtctggacgacttgttcattgatggtctggtccatgtctctagcctggacaatgactactatcgctttgaccaggtagggcaacgcctgatgggggaatccagcggccagacttatcgcctgggcgatcgcgtggaagttcgcgtcgaagcggttaatatggacgagcgcaaaatcgactttagcctgatctccagcgaacgcgcaccgcgcaacgtcggtaaaacggcgcgcgagaaagcgaaaaaaggcgatgcaggtaaaaaaggcggcaagcgtcgtcaggtcggtaaaaaggtaaactttgagccagacagcgccttccgcggtgagaaaaaaacgaagccgaaagcggcgaagaaagacgcgagaaaagcgaaaaagccaagcgcgaaaacgcagaaaatagctgcagcgaccaaagcgaagcgtgcggcgaagaaaaaagtggcagagtgatcaataccctctttaaaagaagagggttagattgctgacaaaatgcgctttgttcatgccggatgcggcgtgaacgccttatccggcctacataatcacgcaaattcaatatattgcagagatcatgtaggccggataaacgtagtgcatcaggcaaaacgtaaacaacgagtacattaatgagcgaaatgatttacggcatccacgcagtgcaggccctgctggagcgcgcccctgaacgttttcaggaagtctttattttaaaaggccgtgaagataaacgtctgttaccgctgattcacgcccttgagtctcagggcgtggttatccagttggcaaaccgccaatatctcgacgagaaaagcgacggtgccgtgcatcagggcattatcgcccgcgtgaagccaggacgtcagtatcaggaaaacgatctgccggatctgatcgctagcctcgatcaaccgttcctgctgatcctcgacggcgtaaccgatccgcacaacctcggcgcgtgcctgcgtagtgcggacgccgcaggcgttcatgcggtgattgtgccgaaagatcgctccgcacagctcaacgctacggcgaaaaaagtagcctgcggcgcggcagaaagcgttccgctgattcgggtgactaaccttgcgcgcaccatgcgtatgttgcaggaagagaatatctggatcgtcggtacggcaggcgaggcggatcatacactctatcagagcaaaatgaccggacgcctggcgctggtgatgggtgcggaaggtgaaggtatgcgtcgcctgactcgtgaacattgcgatgagttgatcagcatcccgatggctggaagcgtttcttccctgaacgttagcgttgcgaccggaatttgcttatttgaagcggtgcgccagcgcagctaatttctcagaattatgaaaagccatccagatttggatggtttttttttgtctatagctggtaagataattacgtattgcaaatattcattttattaatatttaaacttaatctatatggaataatatatgacatggaatccgttggcgctagcgacggcgctgcaaactgtacctgaacaaaatattgatgtaacaaatagcgagaacgcattaattattaaaatgaatgattatggcgatttgcaaatcaatattctttttacttcccgccaaatgattatcgaaacctttatttgtccggtgagtagtatcagcaatccagatgaatttaataccttcttattaagaaatcagaagatgatgccgttgagtagcgtagggatctccagcgtacaacaggaagagtattacattgttttcggggcgttaagccttaaatcttctcttgaagatatcctgcttgagataaccagcctggtagataacgcattggatctggctgaaattacagaagaatatagtcactaattacaaggacgggtatttatgggaattttaaaaagtttatttacgctggggaaaagctttatctcccaggcggaagaatccattgaagaaacccagggcgtgcgcatgctggaacagcatattcgtgacgctaaagctgaactcgataaagccggaaaatctcgcgttgatctgctggcgcgggtgaaattaagtcacgataagctgaaagatttacgtgagcgcaaagccagtctggaagcccgtgcgctggaagcgttaagcaagaacgttaatccgagcttgattaacgaagttgctgaagaaatcgcgcgccttgagaatctcattaccgctgaagagcaagtgttgagcaatctggaagtctcccgtgatggcgtggaaaaagcagttacagcgacagcgcagcgtatcgctcagtttgagcagcaaatggaagtcgttaaagccactgaagccatgcagcgtgcacaacaggctgtaacaacctctaccgttggcgcatcttccagcgttagcacagcggcagaatccttaaaacgcctgcaaacgcgtcaggccgaacgtcaggctcgcctggatgctgccgcacagttggagaaagtcgcagacggtcgcgaccttgacgaaaagctggcggaagccggaattggcggtagcaataaaagtagcgcccaggatgtattagcaagactgcaacgccaacagggcgagtaatttttttgccagcctcgctaaaaggctggcaactattttaaggataaaatatgtctggttttttccagcgtctgtttggcaaggataataagccagctatcgctcgtggtccgctgggacttcatctcaatagtggctttacgctcgacacgttagcgtttcgtttgctggaagatgaattgctgattgcgctgccgggtgaggaatttacggtagccgccgtcagccacatcgatctgggcggcggtagtcagattttccgctactacactagtggcgatgagtttctgcaaatcaataccaccggcggcgaagatattgatgacattgatgatatcaagctctttgtctatgaagagagctacggtatcagtaaagagagtcactggcgcgaggcgatcaacgccaaagcgatgggagcaatgaccttaaactggcaggaaaaacgctggcagcgattttttaacagcgaagaaccgggaaatatcgaacccgtctacatgctggaaaaagtagaaaatcaaaaccatgccaaatgggaggtccataattttaccatgggctaccaacggcaagtaaccgaagatacttacgaatatttgctgctaaatggtgaggaatcttttaacgatctcggcgagccagagtggttatttagccgcgcgttgggtgtcgatatcccgctgacaagtcttcatattattggttaattacaaggacgtttacaatgcatatactggatagtcttcttgcctttagcgcctatttttttattggcgtggctatggtgattatttttctgtttatctattctaaaattacaccgcacaacgaatggcagttaatcaaaaacaataataccgcggcgagtctggcgttcagcggtacattgttgggttacgttatccccttatccagtgcggcaatcaatgcggtgagtattccagactatttcgcctggggcgggattgcactggtgattcagttactcgtttttgctggtgtcagactttatatgcccgcattaagcgaaaaaattattaatcacaataccgcagcaggaatgtttatgggaaccgccgcgctggctggcggtatttttaacgcagcttgtatgacatggtaatggacgatcatggccagaaaacgcaaaagtagaaataacagtaaaattggtcacggagcgattagtcgcattggtagaccgaataatccttttgaaccgtgccgcaatcgctacgcacaaaaatacttaacgttggcgctaatgggcggtgccgcttttttcgtattgaaaggttgtagcgatagtagcgatgtcgataacgacggcgacggaacgttttacgcgacagtgcaggattgtattgatgacggtaataatgccgacatttgcgcgcgtggctggaacaacgccaaaacggcattttatgccgatgttccgaagaatatgactcagcagaactgtcagtctaagtacgaaaattgctactacgacaatgttgaacagagttggatcccggtcgtttctggatttttgttaagccgggttattcgtaaagatcgcgatgagccgtttgtttataacagcggcggttcctcttttgctagccgcccagtctggcgcagcacttctggtgattactcctggcgctccggttctggcaaaaaagagtcttactctagcggcggctttaccaccaaaaaagcgtctaccgtttctcgcggcggctatggtcgttcttccagcgcccgtgggcattggggaggctaatcatgctgagacacaacgttcctgtgcgacgggatctggaccagatcgccgctgacaacggtttcgactttcatatcatcgacaatgaaatctattgggatgagagtcgggcttaccgttttactctgcgccagattgaagagcagatcgaaaaaccgactgcggaactgcatcagatgtgccttgaggtggtggatcgcgcggtaaaagatgaagagatcctgacgcaactggcgatcccgccgttgtactgggatgtgatcgctgaaagctggcgcgcccgcgatcctagcctgtatggacggatggattttgcctggtgtggcaatgcgccggtgaagctgctggagtacaacgccgatacgccaactagtttgtacgagagcgcttatttccagtggctgtggctggaggatgcccggcgcagcggcattattccgcgtgatgccgatcagtacaatgctattcaggaacgcctgattagtcgctttagcgagctttacagtcgggaaccgttttatttttgctgctgtcaggacaccgatgaagacaggagtaccgtgctgtacttgcaggactgcgcccagcaggcagggcaggagagccggtttatctacattgaagatctcggtttgggcgtcggcggcgtactgaccgatcttgatgataatgtcatccagcgtgcatttaagctgtatccgctggagtggatgatgcgtgacgataacggtccgctgctgcgcaagcgtcgcgagcaatgggtggagccgttatggaaaagtatcttgagtaataaagggctaatgccgctgctttggcgcttcttccctggtcatcctaatcttcttgcgtcctggttcgatggcgagaaaccgcagattgccgctggcgaaagctatgtgcgtaaaccaatctatagccgcgaaggcggcaacgtcaccatttttgacggcaagaataacgttgttgaccacgctgatggtgattacgccgatgaaccgatgatctaccaggcgtttcaacctctgccgcggtttggcgatagctacacactcatcggtagctggattgtcgatgatgaagcgtgcggaatggggatccgtgaagataacacactgatcaccaaagacaccagtcgtttcgttccgcattacattgctggataagaatgttttagcaatctctttctgtcatgaatccatggcagtgaccatactaatggtgactgccattgatggagggagacacagtgcactggcaaactcacaccgtttttaatcaacctataccattaaataacagcaacttatacctgtctgatggcgcgctctgcgaagcggtaacgcgtgaaggtgctggctgggatagcgattttctagccagtattggtcagcagttaggaacggctgaatcccttgaactggggcggctggcgaatgtgaatccgcctgaattattgcgctacgatgcgcaaggacgccgtctggacgatgtgcgttttcaccccgcctggcacctgctgatgcaggcgctatgtaccaatcgggtgcacaatcttgcctgggaagaagacgctcgctccggcgcatttgtggcgcgcgcggcgcgttttatgttacatgcgcaggttgaggcagggagcttatgtccgataaccatgacctttgccgccacgccattgttgttacagatgttacccgcgccgtttcaggactggaccacgccgctattgagcgatcgctacgattctcacttattgccaggtgggcaaaaacgcggtttgttgattggcatgggaatgacggaaaagcagggcggttccgatgttatgagcaacaccacccgtgcagagcgtctggaagatggctcttatcggctggtggggcataaatggtttttcagcgttccgcaaagcgatgcgcatctggtgctggcgcagaccgcgggtggtctgtcctgcttttttgtgccgcgctttttgcctgacgggcaacgcaacgcgattcgcctcgagcggctgaaagataagctgggtaatcgctctaacgccagttgcgaagtggagtttcaggatgccattggttggttgttggggctggaaggggaaggaattcgtctgatcctgaaaatgggtgggatgacgcgttttgattgcgccctgggtagccatgccatgatgcgccgtgcatttagcctggcgatttatcatgcacatcaacgccatgtttttggtaatccattgatccaacagccccttatgcgtcatgtcttaagtcgcatggcacttcagcttgaagggcaaacggcgttgctgtttcgtcttgcgcgagcgtgggaccggcgtgccgatgccaaagaagccctgtgggcgcgtttatttacgcctgcggcaaaatttgtgatctgcaaaagaggtatgccgtttgtggccgaagcgatggaggtgctgggcggcattggttattgcgaggagagtgagctgccgcggctttaccgggagatgccggtaaacagtatttgggaaggttccggcaatattatgtgcctggatgtgttgcgcgttctcaataagcaagcgggcgtatacgacttattgagcgaagcatttgtggaagtgaaagggcaggatcgctattttgatcgcgcggttcgtcgtttacagcagcagctgcgtaagccagctgaagaactggggcgagagattactcatcagctattcctgctgggctgcggtgcgcaaatgttgaaatatgcttctccgccaatggcgcaggcgtggtgtcaggtgatgttagatacgcgcggcggcgtacggttgagtgagcagatccagaatgatttattgctgcgggcgacggggggagtgtgtgtgtaagcgtatacgactgatgcgacgctggtttcgattaactaaatgaaatatgtgaaaattgtaggccggacaaggcgctcgcgccgcatccggcattgttcatttgctgtagatgacactcatgcatacagtatcgcctgtacgcgccagttatcaggctgctggtcttcgtacatggtaataatgcggtaccaactcgcaccttgttcatcggcctttaacgccacgatacgttccacgtcctgcggatccccactaatattgctaacactgatctgacctatttcattcaggcccgtcacgcagtcagcactggcgaattctgcagactgtgccgtggcgctcgcaggataagtcactaattgcaggctgggactggcaagtaattgtttcatcgtcagctccatttttcgtttccccacatgttgcagggcattccatcgcggtaataaacgcccaggcttccagccggtaatttattgtgcacaggtaaacgcatagggacgcaaagcaatgtaaagctgactatgtaagttgtctgatttatttacggtacaaaatggcttgactataccactgtcctgtcacgatggtttcgtccaccatgacgacaacgtaataatcagcttttgcagcgacagctttcgctttgatttctgctaatgcgtcatccggagaaccccgaaccatcgtgcttacgctacctattcgctgtaacccttgcgtctggtcgcggcgaatctcttgcggatggtccgttactggcggtgctggctgtggcgtaccttgcagtgcgctacaggcacttaacatcaacaccaataataaactggcaaaccggtaaataacgctattacgtttcctgctaaccatagtgtagtgccttattaatttaactttgggggaatgttcccgaattgttacctggtacgcgattttcgaatgaaaacgtgacgaaagcgtaacccacatctcaacattatgaactaataccgccagcagaaacttgtgctaaggatttcttcatgtcataccagacaaaaaggagagacagatgattgaaatagaaagtcgcgagctggcagatattcccgttcttcatgcttatcctgtcgggcaaaaagataccccgttaccgtgcgtaattttttatcacggctttactagttccagtctggtgtatagctattttgccgttgcgctggcgcaggctggtttgcgggtgatcatgccggatgcgcccgatcacggtagccgttttagtggtgacgcagcgcggcggttaaatcaattctggcaaatcttgctacaaagtatgcaggaattcactactttacgtgcggcaatagccgaagaaaactggctgcttgatgaccgtctggcagtcggtggcgcgagcatgggcgcgatgacggcactggggattaccgctcgccaccccacggtgagatgtaccgccagcatgatgggaagcggctattttacaagtctcgcccgtagtctgtttccaccgctgatacctgaaacggcagcacagcagaatgaattcaataacattgtcgcgccactggcagagtgggaagcgacaaaccacctggaacaacttagtgacagacctctactgctgtggcatggcctcgacgatgacgttgtgcctgccgacgaaagtctacgtttgcagcaggccttaagcgagacgggacgggataaactgctaacctgtagttggcagccaggcgtgcgtcaccgcattacgcctgaggcgttagatgctgccgtgacatttttccgccagcatctttaaacacgcagaatgctgaccccttgcgcttccagttgttgcaggatttccgggttagcatttttgccggtgataagcatatcgatttgatcggcacggctaaaaagcattcccgcgcgttcgccaatcttactgctatcaaccagtaccaccagtttccctaccacgctcagcatcttctgctctgccattgctgtcagcatatcggttttatacaacccttctgcggtcagcccttttccgctggtaaacatccagtgcccggcatagagactgttttcgctgccctgcgggcttaaagtgatggactgacttttgttgtactgtccgcccataatgatcacgctgtcatgttcttgatcgatcaggtaatttgccagcggtagataattagtgatgatttgcactggcttgccacacatttcccgcccaagcagaaacgcggtggagccgcagttgatgactacgctttcgcccggattaaccagctggctggccgctttagcgatacgtactttttcatcgtgattctgcgcctgatgcagattcatcggcgtccagcgcgggcgctgttgggtaatagcttctgcgccattgcgcacttttttcagtttgccgctttcgtcaagtttattgatatcgcgtcgcgcagtggcagggctaattcccagacgctcaacgactttctcaacggtcacaaagcccaattgtgcgagcatttccaggaggatttgatgtctttgtgcttcagtcatgagctattccgataaaatttgatttttttagatgatatttgaaatagccaggaaatactacgccggatagcgcgaacttctccacgctacccggtataaacgacagattacaggaaactcttgaacggcagatccggttcaatagtgaagcaatcatcgaaaccgcgcggatagtggtactcgaagttgtctttatccagcggccaggtaaatttgccacccacctgccagataaacggcttgaagccatacttcaggcgatcttttttcatctcccacagcacgcggatctcttgcggatcggcctggaagttactccagatatcgtggtggaacgggatcactactttcgcattcagcgcttcacccatacgcagcatatcggcgctggtcattttgtcggtgataccgcgcgggttttcgccgtagcttcctaacgccacgtcgatctgatgttcgttaccgtgcttcgcataatagttagagtagtgggagtcgccgctgtgatacagggagccgccaggcgttttgaacaggtagttcaccgcgcgatcgtccatgccatctggcagtacgccagccgctttttgatcggcaggcagggtgatcagtgcagtacggtcgaaagcatcaagcgcatgaatttcaatgtctttcacttttactacatcgcccggtttgaccacgatgcaacgctctttcggtacgccccagccaatccacaaatccacacaggttttcggtccgataaacggtacgtcatctgcacaattctgcatcacggcagcagcgacgttaacgtcgatatgatcgttgtgatcgtgagtcgccagtaccgcgtcgatctggcgaatcgcaaacggatcaagaacaaacggggtggtacgcaggtttggctgcagttttttcacgccagccatgcgctgcatctggtgaccctgtttcattaacgggttaccgtgactttgtttgccagtgccgcaccagaaatcaacgcaaacgttggtgccaccttcgcttttcaaccagatcccggtgcagccaagccaccacatcgcaaatgtgccaggagcgacctgttcttgttcaatttcttcattcaaccagctaccccactccgggaaagtgctcaggatccaggattcacgggtgatacttttcactttactcatcgccatttaccttcatgatagttcaattcgaatcaatatgtgattggttttgattaatcctgacactattttttcaggaaggcaatgaccattttttgactttttgccagggaagttgttgttgattttgagtatggaaagatttaatggaatgtgtaattcaattaactaaatgaatttaaatggataattgtttcgttgtgtgaatcccactctatccatgtggaattatttgcgggtcgcgtcacatttaatcataaataatcttgttgtgattacttttgaaaattagagtgagtgcacaacattccgggtgtgtggaatacccggttacctcttcttcaggagatcgttatggagatcctctacaacatctttaccgtgttttttaaccaggtcatgaccaatgccccgttgttgctgggtattgtgacctgtctgggctacatcctactgcgcaaaagtgtcagcgttattattaaaggcacgattaaaaccataattggtttcatgttgttgcaggcagggtccggcatcctcaccagcaccttcaaaccggtggtggcgaaaatgtccgaagtctacggcattaacggcgcaatttccgatacctacgctagtatgatggcaaccatcgaccgcatgggcgatgcctatagctgggtgggttacgccgtattgttagcgctggcgctgaacatctgttacgtgctgttgcgtcgcattaccggcattcgcacaatcatgttgaccggccacatcatgttccagcaggccgggttgattgccgttacgctgtttatcttcggctactccatgtggaccaccattatctgtaccgcgattctggttagcctctactggggcatcacttccaacatgatgtacaagccgactcaggaagtgacggatggctgtggtttctccatcggtcaccagcagcagtttgcaagttggattgcctataaagtcgcgccgttcctcggcaaaaaagaggagagcgttgaagacctcaaattgccgggctggctgaacattttccacgacaacatcgtctccacggcgattgtgatgaccatcttctttggtgccattctgctctccttcggtatcgacaccgtgcaggcgatggcaggcaaagtgcactggacggtgtacatcctgcaaactggtttctcctttgcggtggcgatcttcatcatcacgcagggtgtgcgcatgtttgtggcggaactctctgaagcatttaacggcatttcccagcgcctgatcccaggtgcggttctggcgattgactgtgcagctatctatagcttcgcgccgaacgccgtggtctggggctttatgtggggcaccatcggtcagctgattgcggttggcatcctggtcgcctgcggctccagcatcctgattattcctggctttatcccgatgttcttctctaacgccaccatcggcgtgttcgctaaccacttcggcggctggcgtgcggcgctgaagatttgtctggtgatggggatgatcgaaatctttggttgcgtctgggcggtgaaactcaccggtatgagtgcctggatgggcatggcggactggagcattctggcaccgccgatgatgcaaggcttcttctccatcggtatcgcctttatggccgtcatcattgtaattgcactggcttatatgttcttcgctggccgcgcgctgcgcgcagaagaagatgcagaaaaacaactggcagaacagtctgcttaataaggagttttgattatgaccgtacgtattctggctgtgtgtggcaacggacaaggcagttccatgatcatgaagatgaaagtggaccagtttttaacccaaagtaacattgaccatacggtaaacagctgcgcggttggcgagtacaaaagcgagttgagtggcgcggatatcatcatcgcttctacgcacattgcgggcgaaatcaccgtgaccggcaacaaatacgtggttggcgtgcgcaacatgctctctcctgccgactttggcccgaaactgctggaagtgatcaaagagcatttcccgcaggatgtgaagtaaggacgcgccatgaaattacgtgatagcctggcggaaaataaatccatccgcctgcaggctgaagcagagacatggcaggaagcggtgaaaatcggcgttgacctgctggtggcggcagatgtggtagagccgcgttactaccaggcgattctggatggcgttgaacagttcggtccttatttcgttatcgctccgggcctggcaatgccgcacgggcgtccggaagagggcgttaagaaaaccggtttctctctggtaacgctgaaaaagccgctggagttcaaccacgatgacaacgatccggtggatatcctcatcaccatggcggcggtcgatgccaatactcaccaggaagtgggcatcatgcagatcgtcaacctgtttgaagatgaagagaattttgaccgtttacgcgcctgccgtaccgagcaggaagtactggatctcattgaccgcaccaacgcggcagcttaagaaggaattgaacatgagtttaccgatgttgcaagtcgcgctggacaaccagactatggatagcgcctacgaaaccactcgcctgattgccgaagaagtcgacattatcgaagtgggcaccattctgtgcgtgggcgaaggcgtgcgtgcggttcgtgacctgaaagcgctctacccgcacaaaatcgtactggcagacgccaaaattgccgatgcaggcaaaatccttagccgtatgtgcttcgaagccaacgctgactgggtgacggtaatttgctgtgcggatatcaacaccgccaaaggcgcgctggacgtggcaaaagagtttaacggcgacgtgcagatcgaactgaccggttactggacctgggaacaggcgcaacagtggcgcgatgcaggcattgggcaggtggtttatcaccgcagccgtgacgcgcaggccgcaggcgtggcgtggggcgaagcggacatcaccgcgatcaaacgtctttccgatatgggcttcaaagtcaccgtcaccggaggcctggcgctggaagatctgccgctgttcaagggtattccgattcacgtctttatcgcgggccgtagtatccgtgatgccgcttctccggtggaagccgcacgtcagttcaaacgttccatcgctgaactgtggggctaaggagcggatatgttgtccaaacaaatcccgcttggcatctatgaaaaagcgctccccgccggggagtgctggctggaacgcctgcaactggcaaaaacgttaggcttcgattttgtcgaaatgagcgtagatgaaactgacgatcgcctgagccgcctcaactggagccgcgagcagcgtctggcgctggtcaatgcgattgttgaaaccggcgtgcgcgtgccgtccatgtgcctttctgctcatcgtcgtttcccgctgggcagtgaagatgacgcggtgcgggcgcaggggctggagattatgcgtaaagctatccagttcgcccaggatgtcggtattcgcgtgatccagctggcgggctatgacgtttactatcaggaagccaataacgaaacgcgtcgtcgtttccgtgacggcctgaaagagagcgttgagatggcaagccgcgcgcaggtgacgctggcgatggagatcatggattatccgttgatgagctccatcagcaaggcgctgggatacgcgcactatctcaacaatccgtggttccagctctacccggatatcggcaacctgagcgcgtgggacaacgatgtgcagatggagttgcaggccggaatcgggcatatcgtcgcggtacatgtgaaagacaccaaacctggcgtcttcaaaaacgtgccgtttggcgaaggtgtagtggatttcgaacgttgtttcgaaacgctcaaacagagtggctattgcgggccgtacctgattgagatgtggagcgaaacggcggaagacccggcggcagaagtggcgaaagcgcgtgattgggtgaaagcgcgcatggcgaaagcgggcatggtggaggcggcataatgcaaaagctaaaacagcaggtatttgaagccaacatggagctgccgcgctacgggctggtgacctttacctggggcaacgtcagcgctatcgaccgcgaacgcgggctggtggtgatcaagcccagcggcgttgcctacgaaaccatgaaagcggccgatatggtggtggttgatatgagcggcaaggtggtggaaggggagtatcgcccatcttccgacactgcgacgcatctcgaactctaccgtcgttacccgagccttggtggcattgtccatacccactccactcatgccaccgcatgggcgcaggcggggctggcgatcccggcgttaggcaccacgcacgccgactacttctttggcgacattccgtgtacgcgcgggttaagcgaagaagaggtgcagggcgagtatgaactgaacaccggcaaagtgattatcgaaacgctgggcaacgccgagccgctgcatacgccgggaattgtggtgtatcagcacgggccgttcgcctgggggaaagatgctcacgatgcggtgcataacgcggtggtgatggaagaagtggcgaaaatggcgtggattgcccgcggcattaacccacaactcaatcacatcgacagcttcctgatgaataaacacttcatgcgtaaacacggtcctaacgcttattacgggcagaagtaaaacacgcgctgcggaaatttccttcctcgggagataactggtctaattccgcagccgtttttcaaaaaaaagccccctgcgaagggggcaaagcaaactatggcaatgtttcgttggttatacctggtgttagcgataaatatccgcgctggcgtgcatattgccgttactccccggttcccgcatcagaattacgtggtagtacgttgcgccttgcgcatctgtttcttcatttaatgcctgacgtgcttcgctttcagtggcgaaattatgattgatataaatcacgcctaagctttgcacatcgtccatatttctggcctggtggttattaatttcaatggctgcccatgtatttgcacttagcaaaagcacagccagaagggctaaaacacgactgaacatagatacctcctcgacggctgactttgtgtgctctcctctgtgatgatcttctgatttaattttaatcaatgataaagaagttgatggtgaccatttctgatgcagttgttcaaaaaaacaccatgatgaagtgtgatgaacttcaaatcagcgtgttagaggttaattgcgaaaggggagatttatttcggctctgcccttgagtttagcgaggcatacaagtactataacgcgtcatttttcagccgacctttaacacgttccttgcctccccgggattcggctgacccagacaggaggctgaataatccgtaaggagcaattcgatgcgtcattacgaaatcgtttttatggtccatcctgaccagagcgaacaggttccgggcatgatcgagcgctacactgctgccatcactggtgcagaaggcaagatccaccgtctggaagactggggccgccgtcagctggcttacccgatcaacaaactgcacaaagcacactacgttctgatgaatgttgaagctccgcaggaagtgatcgatgagctggaaactaccttccgcttcaacgatgccgttatccgcagcatggttatgcgtaccaagcacgctgttaccgaagcatctccgatggttaaagcgaaagacgagcgccgtgagcgtcgcgatgatttcgcaaacgaaaccgctgatgatgctgaagctggggattctgaagagtaatttctgatgaccaaccgtctggtgttgtccggcaccgtgtgcagggctccccttcgaaaggtcagtccaagtggaattcctcactgccagttcgtgcttgagcatcgttctgtgcaggaggaagccggctttcaccggcaggcgtggtgtcaaatgcccgttattgttagcggacacgaaaaccaggccattactcacagtataacggtcggcagtcgcataaccgttcaggggttcattagttgccacaaggcaaagaacggactgagcaaaatggttttgcatgccgagcagattgaattgatagattctggagactaaccatatggcacgttatttccgtcgtcgcaagttctgccgtttcaccgcggaaggcgttcaagagatcgactataaagatatcgctacgctgaaaaactacatcaccgaaagcggtaagattgtcccaagccgtatcaccggtacccgtgcaaaataccagcgtcagctggctcgcgctatcaaacgcgctcgctacctgtccctgctgccgtacactgatcgccatcagtaatcggtcacggtccattaatacgactttgagaggataaggtaatgcaagttattctgcttgataaagtagcaaacctgggtagcctgggtgatcaggtaaacgttaaagcgggctatgctcgtaacttcctggtaccgcagggtaaagctgttccagctaccaagaaaaacattgaattcttcgaagctcgtcgcgctgaactggaagctaaactggctgaagttctggcagctgctaatgctcgcgctgagaaaatcaatgcactggaaactgttaccatcgcgtctaaagctggcgacgaaggtaaactgttcggttccatcggtactcgcgacatcgctgacgctgtaactgcagctggcgttgaagtggctaagagcgaagttcgtctgccgaacggcgttctgcgtaccactggcgaacacgaagtgagcttccaggttcacagcgaagtattcgcgaaagtgatcgtaaacgtagtagctgaataattcgttattcaacgagacgtaaaaacgccgaccattggtcggcgttttgctttctatttttcgtcaggtattagtttcgcaagtagatccattcaccattctcttgtgtccataagtcaggatggtttgctggcgttagatacatacgagcgcaactgatgtctcgctcctgcggcactcgctcgaaacccaaaccgctgtagattgcggcactactacttaaggaacgcagaccaattttcaaatcatggggtaaatcagaatacgcgtttagcaatgcagcaatgatgaatccgagggcattagaaacgcctgtaacagtgcgaagttggtcgatataaagatcgattgttggtagttcagaactccagcaattaggcatttgggcaggaagggttacaacgtatcctatcgtttggccggtatagtctggagtaccataaccaggtcccaaaaccacttcgtgtattgtgtatttactgttgggttcgaaggattcgacatcttgcaataaatatttcagttctgcggttaacctcgcacccgcgtaagctttattgtatttctgggcgtgaatattatctaatgtagcttcatggttccatccaaaagaattatcaccattcattgtgattccatcgtaagcattacacctcgtcgctaacttattgaatgcttgccagtcactgagatctagtttgtggatctcaacagtacgtctgccatcgcaattatgatctcttccacgattactaagtaatgtagcgcgtgcgtattgatgaaattttaattttactggtttgtcggtggagctaaaacgagataaatatgcaggaaaactataaatagtcgttggtaatgtcattgtaatgttacctgtttaatgtttttataaatatcgcagctgaatgttcacagaaaaaaatcgatattaataaaaataagtttgttttctgaagtggtgaaaatagcggatggtgaaagatattaatatcaaaaatcgctcattatggatataacgatgcacccggggagaaaatgacttccacgccttacaccgtacattcttgttgtgcggtatgtaattattctacgctgtcggtatcggtgtattcgttaatcagcaggttagccagccacaaaaagccattgagaaaattattgattttacatgggattattatattgctaatccttggtttttaaaaattgtgcatagtgaaaatcaaagtaaaggtgtgcattatgcaaaaagtcagcgtctcttagaaattaaccatgcgcacttgcagttaatggaatccttattggatgaagggaagaaacacaatatttttaagccagatatcgacccattgcaggtgaatattaatattgctgcgcttggcggatattatttgatcaaccagcatacgcttggcctggtttatcacatcagtatggttagtccccaggcactggaagccagacgtaaggtcatcaaagagacaatccttagctggcttttggttgaccctagttctaccgcgcacgaataattaccgcgcacgaataaaactgccatccggctggcgggtgaacaggacctgttgattattccccgtatcaatggttaagcccgtcaccacgccgctggcgttctggcggattttcaccatctgcccgttttgcaaattactcagcggcttacccgcgccttctacctgcgccattgcatagacatcggtagcgggcagtccgtggtcgcggaacagctgcgccatcgttttaccgggttcgacacggtaagagcgccattgattatcaattccgctatctggctggaatggttgcgtttgggtagtttgcggctgctcttctggctggccttcctgtataggttctggagcgaccggagccacctgatcaggaccattttgtggggtaactaattgcgcccgcagctgttcttctgtcggcggttgactttggctctgaatatctaactgcgcttcacgcgtcaccaccggcgcgttgggcgtatcatcagatggaagcagaaatccgaccaccaatacaatggcggcaataatgatcccccgacgatgcatcggcggcagcgggtccatgaagcgaaaattgtccggcgcgtgccagactttctccagggttggttttagttcaaagcgcccgggcatggtttcctcctgctccgcgtcttgttcctcaatcatagcctatgaataagctaacgctatgatgtccgtggtaaacccgcctttattatattcatacgggatattgctattgtttctttttccctgggatttgtcatcattcccgcgacaaagttttacccaaagaagtgtggctgatatgctgcccgctactttataccctaagaaaggaaatacgatgaccaccccaacttttgacaccatcgaagcgcaagcaagctacggcattggtttgcaggtagggcaacaactgagtgaatctggcctggaagggctgctgccagaagcactggttgcaggtattgccgatgcgctggaaggcaaacatccggctgttccggttgatgtggtgcatcgcgcgctgcgtgaaatccacgagcgcgccgatgccgttcgtcgtcagcgtttccaggcgatggctgctgaaggtgtgaaatacctggaagaaaacgccaaaaaagaaggtgtgaatagcaccgaatctggcctgcaattccgcgtgatcaaccagggtgaaggcgcaattccggcacgtaccgaccgcgttcgtgttcattacaccggtaaactgatcgacggcaccgtgtttgacagctccgttgctcgtggtgaacccgctgaattcccggttaatggcgtgatccctggctggattgaagcactgactctgatgccggtaggttctaaatgggaactgactatcccgcaggaactggcatatggcgagcgcggcgcaggcgcatccatccctccgttcagcaccctggtgtttgaagtcgaactgctggaaatcctctaagcagcgcattctgttcccctcgaacgagaggggagcaggcattcagcaataaacccttcagtttgccaaacggcgctattttgtgttgcaaagaccccgtaagcgtgtatttttgtgagctgtttcgcgttatcaccgtgatatgacactcactttaaacataaaattaacattagatctaaatcttagtattcatcccgcgtattgttacctaatatcgatgagtcccgatacagattcgtcgtatcatagactgactaaaggccgtagagcctgaacaacacagacaggtacaggaagaaaaaaacatggtagatcaggtaaaagtcgttgccgatgatcaggctccggctgaacagagcctacggcgcaatctcacaaaccgacatattcagcttattgccattggcggtgccattggtacggggttgtttatggggtctggcaaaacgattagccttgccgggccgagcatcattttcgtttatatgatcattggttttatgctctttttcgtgatgcgggcaatgggggaattgctgcttagcaatctggaatacaaatcttttagtgacttcgcttccgatttactcgggccgtgggcaggatatttcaccggctggacttactggttctgctgggttgtaaccggtatggcagacgtggtggcgatcacggcttatgctcagttctggttccccgatctctccgactgggtcgccagcctggcggtgatagtgctgctgctgacgctcaatctcgccaccgtgaaaatgttcggtgagatggagttctggtttgcgatgatcaaaatcgtcgccattgtgagcctgattgtcgtcggcctggtcatggtggcgatgcactttcagagtccgactggtgtggaagcgagtttcgcgcatttgtggaatgacggcggctggttcccgaaaggtttaagtggcttctttgccggattccagatagcggttttcgctttcgtggggattgagctggtaggtacaacagctgcggaaaccaaagatccagagaaaagtctgccacgcgcgattaactccattccgatccgtatcattatgttctacgtcttcgcgctgattgtgattatgtccgtgacgccgtggagtagcgtagtcccggagaaaagcccgtttgttgaactgttcgtgttggtagggctgcctgctgccgcaagcgtgatcaactttgtggtgctgacctctgcggcgtcttccgctaacagcggcgtcttctctaccagccgtatgctgtttggtctggcgcaggaaggtgtggcaccgaaagcgttcgctaaactttctaagcgcgcagtacccgcgaaagggctgacgttcagctgtatctgtctgctcggcggcgtggtgatgttgtatgtgaatcctagtgtgattggcgcgttcacgatgattacaaccgtttccgcgattctgtttatgttcgtctggacgattatcctttgcagctaccttgtgtatcgcaaacagcgtcctcatctacatgagaagagcatctacaagatgccgctcggcaagctgatgtgctgggtatgtatggcgttctttgtgttcgtggtcgtgttgctgacactggaagatgacactcgccaggcgctgctggttaccccgctgtggtttatcgcgctggggttgggctggctgtttattggtaagaagcgggctgctgaactgcggaaataaccgcattatcatgctggatggcgcaatgccatccagcttttagatcactcacccgccagcgcgcgtgggaacagtacattgttttccagactgatgtgatccatcaggtcatcaatcagttcattaatgccgttatacatcgctttccaggtggtgcaggcttctggcggcggtgtgacgttattggtggtgtgtttaatcacttccagcagttcgcccgcttcatcgtgctcgctttccattacgctgattggccccattgcctggctgcccatgccttgtttgatcatcgggaagaggatctgctcttctttcatcatgtggctggaaagctcttcatgcagcatggtcaggtattttgtcagcccttttggcacgctcggtttgtcggcgtgaacgcgctcgactttagtcgcttgcagaatcagctccggcagttgctcgcggtgacgatcgtggtagcgcacgatgatatggtcgatgatttctgccagcggggcgctacgccagtctttctcaatcggttgttcagcgagctttgccagttcagcttcaatgacctcaacatccagttctttacgtgccgccgcgcgcgccagcgtctgcttaccgccacagcagtaatccatatcatatttacgaaacagagcactagcgcgaggaatagagagcgccagttcacctaaaggttggtcgcgataagccatagctgatacctcattcttaataagataagatgtattttaaatgcatctttaaggcaaaagctataacccttacgtagcagaggcttatttaactcactgccagcgtgtcaactttcactgacagattcagttaaaggtttttctggttttgctctgaccgcgatgaccacgccaatcactaacagcgcgataccgctcagcgtcattagcggcggcatttgctggcggagtaaaaaggtgtacagcaaacctgccagcgtttcgaaaacaatcagcggcccgagaatcactgtcggtaatagctggctggcgacgttccagcagagtgcgccaacccaactgcaaagcacggctatcgcaaccatcagactaataaacaccagcggacgggggccaaagggtagggagaagtccggcgtttgcgtattcagccagtaacaagcgacgagatagccgataagactaaccggcagtgtgaccagcgcctgcgctgttgcccacatcatcggatgtttgtcgggattttcccgcagccagcgggcgttgcgcagggcataccacgcccagcagaccacggaaactaacgccagcacgatgccagaggtataacgtgcccagtcaaaatcggggagtccgtggtttaactcagcaatattcacacacgccaggccgatgccaatacaaatcagtgctggggcgagttttccccacgcgagtttgccgtcgcgctggctataaagcagattggcaaagacaggaatgaccaccggcagggtgccgataatcatcgtggaaacaggcgcgccagtacgttgaatggcactggcaaggcagaagtaatagatgaggttgcccatcatagtgagcatcaaggcggtaagccagtcgcgacgcgccaactgacgcagacgcacgcgtcccagccaggcaatgggcagcgcaattaaccctaacgccagataacgccccatgctctgcaacatcgccgggtattccggcacgatcaacggcccgacaaaaataagcccccacatcaaccctgctaacagggcgtacagcacgccgctaatcattactggcatccattgatctgtcagaagaaagttcaggaagcagacatgattgctcccggcatcccgtcattatcagagaggatgcgggaggatgccactttaattaattagttattaacattaaaaagatggcttacgctttcggctaacgttgtcgttgggtggccaatcaatttgctaagtgttttgctgtcatcaaacagaccgcctttgcttgcgccaacgtcagaatccgccagcatatccgccagtccgtcgggcagtccgacgcttttcagtgccgcggcgaaatcggcttcgctcagattttgataggtaacctgtttgccgctctgtttggtcagctctgccgctaactgtgtcaacgtccaggcactatcgcccgccagttcgtaaaccttgccttcgtgaccggcttcgctaatcacgcgtgccgcagctgccgcataatctgcccgcgttgcactggcgattttgccatcgcccgccgcaccgataaatacgccgtgttccagtgctgccggggcgctggcgaggtagttttcgctgtaccagccgttgcgcagcagggtgtaaacgatgccagaatcagccagcattttctccgtctcgatgtgctcatcggcgaggccgagcggggaggtatctgcatgtagcaggctggtataagcgataaatttcacgccagccgcctttgcggcattaataacattacgatgctgcggggcacgttgacccacttcgctggaagagatcagcagtagtttttccactccctgaagtgcagatgtcagtgcggcttcatcgccgtagtcagcctgacgcacggtaatgccttgtgctgccagggcttgggcttttgccggattacgaacgatagccactatttggctggcaggaaccgttttcatcaaggattcaataacatagtgaccaagttggccagtggcaccagtaatagcgatcatgggaagtctccatcgttttgtcttgtgtttaaatacgctaacacctaaacttacttttagtaagtacgtacaaaaaggtaagtatgaaatgagtcaggttagcctgagccaacaactgaaagagggtaatctctttgcggaacagtgcccgagccgcgaggtgttgaaacacgtcaccagccgttggggggtgttgattctggtggcgctacgcgaaggtactcatcgctttagcgacctgcggcgcaaaatcggtggggtgagtgaaaagatgcttgcgcagagcttacaggcgttagaacaggatggttttcttaaccgtatcgcgtatccggtggtgccgccgcatgtggaatatagcctcacgccgctgggcgagcaggtgagcgaaaaggttgctgcactggcggactggattgagttgaatttgcccgaggtgttggcggtgcgggatgaacgtgcggcataactgccggatgcgctgagcttatctggtctacggtgcatggcttgtagggcggataagatgcgccagcatcgcatccgccaataaatgccggatgcggttgatgatttataggccgaaaaagaagtgttttacttactcaaatccacctgataaatcgcaaacccgatatcatcggtcgcgactttattcatcggatactgccctttctctttaataaacgctgcggctttatcactcggagaggtttcgaaacggatatccagtttcttatcgccagctatcggtgctaaacgccagttgttatctgccgccgggtgaatttcccccgcacgtttgctctcatcagcaatccacgctgccagcacgctgcggttctcatccggactagcaaaagcgatatggctgtcgcccgtaccggcaaatttgccgccgtaagcgcgatagttattggtggcaaccaggaacatggcgttcggatcaatcggcttgccattaaaggtcaggttcttaatcctttccgcattggcattaatcatctggcactcgccgtcataacgggcgggctgggtaacatcaatctgataattcacaccatcaataacatcaaagttataagtgcggaaaccatcccagttgatgagactctgtggtttcgtgctgttgggatcaatctggttaaactgtcccgcggagcactccagccactctttcacctctttaccgctggctttcaccacaatcagcgtattgggatagagataaagatcggcggcattacggaaggtcaactggcctttttccacctccacatagcttgccgggtcatttttgcgaccaccgactttaaacggtgcggcagcactaagcaccggcagttttgccagatccggatcgccctgaatgtaatgctcgacatacgctttttgcgcgttgttcaccacctgcacggtcggatcgtcctgcaccagcgccagatagctatacatattgtcggcagatttaccgattggcttgctgacgaactggcgtgtggcatcgtgatcggctttgagtgtttctaccagcttgctgtcttccgccgcgagggattttttattagcgatgtcgtaaatcggtcgtgcttccgctttcgcctgcgtcacctgccatttaccgctgtcattactgagttgtaagtcgaccacaccaagatgatcgccccacatgcctggcattaccgccggaacaccattcagcgtgcctttggcgatatcagccccttcgatatcagcaaaatctttacctgggaaaacggcgtgagcatggccaaacataatggcgttaacgcccggaatttcactgaggtaataaacactgttttccgccatcactttatacggatcggcagatagcccggaatgtgccagaacgacaacaacatcggcacctttctcgcgcatttcaggcacgtatttgcgcacggtttcggtaatatcattcaccgtcactttcccggataaattagctttatcccagcccatgatttgtggtggcacgacgccaatatagccaatcttcagcgtctgtttttttccgtctttatcgaccacttcggtgtctttaattaaatacggtgtaaacattggctgtttggttctggcgtcaatgacgttggcatttacataagggaatttcgctcctgccagcgcatttttcaggtaatccagaccgtagttaaactcgtggttgccaagcgttccgacggtatagtccagcgtatttaatgccttatagaccgggtgaatatcacctgcttttaatcctttcgcgctcatgtaatcggccagcggactcccctgaatcaaatcgccgttatcaaccagtacgctgtttttcacttcattgcgggcatcgttaatcaggcttgccgtacgtaccagtccgaatttttccgtggcggtgtctttgtaataatcgaaatccatcatgttgctatgcagatcagtggtttccatgatacgcagatcgaccgtcgctgcattcacactggcggcaatcagcgtggccaggagcgttgcgctaaacttaatcatcagggacatccttttatcatcgggaatacgaaagaaaagggagaataaacgtcttacttatagaacagtgaagaatgccacaattttacgctttgaaaatgatgacactatcacagttggcgcattcattaacgatagggtataagtaaaacaataagttaacaccgctcacagagacgaggtggagaaatgttagatcaagtatgccagcttgcacggaatgcaggcgatgccattatgcaggtctacgacgggacgaaaccgatggacgtcgtcagcaaagcggacaattctccggtaacggcagcggatattgccgctcacaccgttatcatggacggtttacgtacgctgacaccggatgttccggtcctttctgaagaagatcctcccggttgggaagtccgtcagcactggcagcgttactggctggtagacccgctggatggtactaaagagtttattaaacgtaatggcgaattcaccgttaacattgcgctcattgaccatggcaaaccgattttaggcgtggtgtatgcgccggtaatgaacgtaatgtacagcgcggcagaaggcaaagcgtggaaagaagagtgcggtgtgcgcaagcagattcaggtccgcgatgcgcgcccgccgctggtggtgatcagccgttcccatgcggatgcggagctgaaagagtatctgcaacagcttggcgaacatcagaccacgtccatcggctctagcctgaaattctgcctggtggcggaaggacaggcgcagctgtacccgcgcttcggaccaacgaatatttgggacaccgccgctggacatgctgtagctgcagctgccggagcgcacgttcacgactggcagggtaaaccgctggattacactccgcgtgagagcttcctgaatccggggttcagagtgtctatttactaaattcagatggcagaaacagtgtatttcctgattctgccatcctgatttctcccaacctaaaaagttataaataaaaagagattgtatttaaagtgcaaaaattcaattgctaataagttacattttaataatgagcgttttttgatagtttacttctatagtgagatatttaatggcgacataaagtaaccaaataaaataaggttgtcatatgttacccaggatcagacacaataattttattggtgcggtggagttatttgtaaagtctagctatacaaaaacacatagtaacaatttttttaacaacatccatcatgcatttaagaaaaaagattggattagcaattatgatagcctgttaactttgagggagttctttcgttgcgcaactcagattgataaaagtggttatcaggtgcttagtagtaaaaatgaaactgttcacgccatggataagtttcttatcagtttcagccttaaagataacggtgccgaatatacaatgacattgcgaggtagtggatttgaatacgaagaaatacccataacaataaatgaatataacagtttcatggatttcaaaaaccgtgaatttccgttagaacaaaacagacgattgtatgcccgggatattctacagaaaaaacagtctgacataccgaaaaggattaaaggttatattcaccaggcgattggtgacgtgtctttaggttatgccttattggaggatatagtaagcaaattaaaacggggtaaatttgaactccaaataccaggaggtggaattaaagaatgcgatggatggtatatttacgaaaaaataattgatgataattttgccatagtcatagaatctttgggctttgcgcttaaaatctatggaggggatgaacgttttcgtaatggttcctctgttgttttggaggatgaagattactctcttatttataattttctggttaatgcaggttgccaacaagtcgaattagccgaacaagtggatgcgatagtaagtgcgaatctggccgcagatagcgatattaccaaagaaaagatttgcgagaaatataaaagcaccattgaggcgtttaaaaaagagcaactagcgttaccagtattagttcggcgtaagaacagtgagacttaattcccctatcccatagataacgataggggaaaattatttttgcagaatttatgttattgccattatttgagcaacttttgcagcaggtccatcacttgctgcacctcttccggtgtgagcgccccgtctttggcccattgcacgcgaccatccttatccagcaccactacagcggaactttcttcatccagctgccaggcaccgagcgcgacgccattgctatcgacaataaactggctccagggataaagctttttattactctccagactgctgcgcacaaacatcccactacccggaatcgcgtcgtcggtgttaacaatggtggtggtctggtaacgatcgtgcggtaacttcgcacttttaatcgcttcaatcagcgtcgcgtttttctcttttgcagaggtgcgaccagcaatatgttgcagtactcgcacttttcccactaactgcgcgctgttccaggttttgtagctaaactgatctttatcaagcaccaactcgccccgatcggtaatgccaatcggcggcactcgctgaccggtttcgaactgatgtgcggaagccatcatcggcaacagcaggcaggtgagtgccagaatcttgcgtagggtcatggtgtttccttcttatgatatgcaggtgatccgaccacttgggtctgagttttaatcatatgtgctatttatcgaatttcccgcaagtgtgatgccagtttgcggtcaagcgcacaaatcatatgaaaaatgaatgcttatactgaagaccgcgcttcggtaaaaagataattctgaataattgtaacctttaggtaaaaaaagttatacgcggtggaaacattgcccggatagtctatagtcactaagcattaaaatttgcgcctcataatagttgggccgattgtggcaccgcacaggcgtaatactcagcaggagataacaatgaaaattttccaacggtacaacccacttcaggtggcgaagtacgtaaagatcctgttccgtggacggttatacatcaaggacgttggcgcttttgaattcgataagggtaagattcttatcccaaaagtgaaggataagctgcatttgagtgtgatgtccgaagttaaccgtcaggttatgcgtctgcaaacagagatggcttaaccaaagtgctatgcagtaaaaagtgctatgcagtaataagacggctcctgattcaggagccgttgatgtttctgggggttacgcgacgctttcttctttatctttagcgtcaggcagttttgggctaagggcggtggccttgctgtcgatccgggtcaccagcagctggtcgatgcggtagttatcgatatccaccacttcaaatttgtagccggcgaatttcacgctatcggtgcgtttcgggatcttacgcagcataaacatcataaagccgccgatggtttcgtagttgccgctctgcgggaactcgtcaatatccagcacgcgcatgacgtcgtcaattggggtgccgccgtcaatcagccaactgttctcatcacgggcgacaatctgctcttccagcccctgaccgaccagatcgcccatcagcgtggtcatcacgtcattgagggtgatgatccccaccaccagcgcgtactcgttcatgatcaccgcgaagtcttcacctgcggttttaaaactttccaacgcctcactaagggttaacgtatccggcacaatcagcgtgttgcgaatttgtacgccgctgttcagtgccaggctttggttagccagcacgcggttcagcaggtctttagaatcgacataaccgatgatgtggtcaatatcttcattacagacgaggaacttagagtgcggatgttccgccaccttattcttcaggctttgctcatcttcgtggagatcaaaccaaatcacgttttcacgcggtgtcatactagacggaacggtacgggattccagctcaaagacgttttcaatcagctcgtgttcctgtttacgtaacacgcccgccagcgcaccggcttccactaccgcgtagatgtcatcagaagtgatgtcatctttacgtaccattggcagtttgaaaatacggaagattatgttcgccaggccgttgaagaaccacaccagcggggtgcaaacgtacaggcagaagcgcatcgggttgatgatacgcaaagccacagcttctggcgcaatcataccgatgcgtttcggggttaaatccgcaaacaggataaacatgccagtcactaagctgaaagagagaataaagctcagttgctcagagagctctgcgctcatatagcgggagaacaggctgtgaaaagctggagaaaatgccgcatcaccgacgataccgccgagaatcgccactgcgttcagaccgatttggaccacggtaaagaacatgccgggattttcctgcatattcagaacgcgttgggcatttatattgccttcatcagccagcagtttaagtttgattttgcgactggcggcaaggctgatctcggacatgctgaagaacgcacttacagcgatcaagcagagtatgactaaaatactgtttaacatatcttatccgacctttcaggccagatcctcggaaggggaagttgattaatttgtgtgaaatacacattgaaagccgattcgaagaaagtgaaccggcattttcagtggctagtatagcgtaaggtactgtaaagccgccagagggttaaaattcagacagctgaaaaatgcaaaactgcctgatacgctatgccgatcaggcctacgcagtccttgcaatatattgaatttggacgattttgtaggcctggtaagtcgtttacgccgcatcaggcatagacaaagagcactttatcaacaaactacatttgtacccgtaacgttatgcttccggcggcagacagacgccaattccgccaattccacagtaaccatacgggtttttatgcagatattgctggtggtcatcttcggcataataaaacggtgtggcgttagcgatttccgtggtgatgtgacgatcgtcatcggcggcaagcatcgccgcctgaaaacgttccagactggcgcgagctgcggcatcctgttctggggtcagcggataaatcgcactacgatactgcgtgccgtggtcattgccctgacgcattccctgggcgggatcgtgattctcccaaaatacctgtagcaactgctcatagctgatgacggaaggatcgtaaacaatgcgtaccgcttcggcatgacccgtatcaccggagcacacttcccgataagtcggatttggcgtatagccgccggtatagcctgcggcggtgctgtaaacgccgggtaactgccagaacagacgctccacaccccagaaacaacccatcgcaaaaatggcaatctccattccgtcaggtacattggtcatactgtgaccgttgaccgcatgcagcgtggctacgggcatcggggtgttacgtccaggcagggcatcggcgggggaaaccagatgctttttatcaaataaactcatggtgtcgctctcccgaaaatcggtcattggggttaaggttgtaacaagaggcgtatttgcacacaataaccaccgtgaataggtctaaagtaaaacataagaaatatttggggtttagtctgctttttaatccatattactggatttttgttaagccgtttaacggcgttccaggggcaggaaaaaaggatattcaggagaaaatgtgcgctatatccgacagttatgctgtgtaagcttactctgcttaagcggatctgccgtcgccgcgaacgtccgtctacaggtcgaggggttaagcggacagctggaaaagaacgttcgtgcgcagctttctacgattgaaagtgatgaagtgacgccagaccgtcgctttcgcgcacgcgtcgatgatgccatccgcgaaggtctgaaagcgctgggttattaccagccgaccattgaatttgatctccgtccaccgccaaagaaagggcggcaggtattgatcgccaaagtcacgccaggcgtgccggtgttaattggcggcaccgatgtggtattgcgcggcggcgcgcggaccgataaagactatttgaaattgctcgatactcgcccggctattggcacggtactgaaccagggcgattatgaaaatttcaaaaagtccttaaccagcattgcgttgcgtaaaggttatttcgatagcgaatttaccaaagcgcagctgggcattgcgctcggcctgcataaagccttctgggatattgattataacagtggcgaacgttaccgctttgggcatgtgacctttgaaggaagtcaaatccgcgatgaatacctgcaaaatctggtgccgtttaaagagggcgatgagtacgaaagcaaagatctggcagaactgaaccgccgactttctgctaccggctggtttaacagcgtggtggtggctccacaatttgataaagcgcgcgaaacgaaagtattaccattgacgggcgtggttagcccgcgaacagaaaacaccatcgaaaccggggtcggttactctacggacgtgggaccgcgcgtgaaagcgacgtggaaaaagccgtggatgaactcttatggtcacagtctgaccaccagtactagtatttccgcgccggaacagaccctcgacttcagctataaaatgccgctgctgaagaatccactggaacaatattatttggtgcagggcggttttaagcgcactgacctgaacgataccgaatctgactccactacgctggtggcttctcgctactgggatctctccagcggctggcagcgtgccattaacctgcgctggagtctcgaccactttactcagggtgaaattaccaataccacgatgctgttttatcctggggtgatgattagccgcacgcgttctcgtggtggcctgatgccaacctggggcgacagccaacgctactctatcgactactccaacacggcctggggtagtgatgtcgatttctccgttttccaggcgcagaacgtctggatccgcacactgtacgatcgccatcgttttgttacacgcggcacgctgggctggattgaaaccggtgatttcgacaaagtaccgccggatctgcgtttcttcgccgggggcgaccgcagtattcgtggctacaaatacaaatctatcgctccgaaatacgccaacggtgacctgaaaggggccagcaagttgataaccggaagcctggaataccagtacaacgtgaccggaaaatggtggggcgcggtgtttgtcgatagtggcgaagcggtaagcgatattcgccgcagcgactttaaaaccggtaccggggtcggcgtgcgctgggaaagcccggtcgggccaatcaaactcgattttgccgtaccggtcgcggataaagacgaacacgggttacagttttacatcggtctggggccagaattatgagtttatggaaaaaaatcagcctcggcgtggttatcgttatcttactgttgctgggaagcgtggcgtttctggtgggcaccaccagcggcctgcatctggtatttaaagcggcggatcgctgggtgccaggactggatattggcaaggtcaccggcggctggcgcgatctcaccttgtctgacgttcgttatgagcagccaggcgtggcggtaaaagcgggcaatctgcatctggctgtcgggcttgagtgcctgtggaacagcagtgtttgtattaatgatctggcgctgaaagacattcaggtcaacatcgacagtaaaaaaatgcctccttctgaacaggttgaagaagaggaagatagcggtccgctggatctctccacgccgtatcccatcaccctgacacgggtggcactggacaacgtcaacattaagattgatgacaccacggtaagcgtgatggacttcacctccggcctgaactggcaggagaaaaccctgaccctgaaaccgacgagcctgaaaggcctgctgattgctctgccgaaagtggcggaagtggcgcaggaagaagtggtcgaaccgaaaattgaaaatccgcagccggatgaaaagccgctcggcgaaacgctgaaagatctcttttctcgcccggtattgccggaaatgaccgacgtgcatttgccgcttaacctgaacattgaagagtttaagggcgagcagctgcgcgtgacgggcgacacggacatcaccgtgagcaccatgctgctgaaagtgagcagcattgacggcaatactaaactggacgccctggatatcgattccagtcaagggatcgtcaacgccagcggcacggcgcagctgagtgacaactggccggtggacatcactctcaacagtacactgaacgtggagccgttgaaaggtgaaaaagtgaagctgaaaatgggcggcgcgctgcgcgaacagctggagattggcgttaatctttccggtccggtggatatggatttacgcgcccagacgcgactggcggaagccggattgccgctcaacgtggaagtgaacagcaaacagctttactggccgttcactggtgagaagcagtatcaggcggatgatctgaaactgaaacttaccggcaaaatgaccgattacacgctctctatgcgtacggcagtgaagggacaggagatcccgcccgcgactattaccctcgacgccaaaggtaatgaacagcaggtcaatctcgacaaactcaccgtcgcggcgctggaagggaaaactgaactcaaggcgttgctcgactggcaacaggccattagttggcgcggtgagctaacgcttaacggcattaacaccgccaaagagttcccggactggccgagcaaactcaatggcttgattaaaacccgcggtagcctgtacggcggcacctggcagatggacgtgccggagttgaagctgaccggtaacgttaaacagaacaaagtgaacgttgacggcacgctgaaaggcaacagttatatgcagtggatgatcccagggcttcatctggaactcgggccaaacagtgccgaagtgaaaggcgagctgggggtaaaagatctcaatcttgatgccaccatcaacgcgccggggctggataacgcgctgccggggcttggcggtacagcgaaagggctggtgaaagtacgcggcacggtggaagcgccacaactactggcagatatcaccgcgcgcggcctgcgctggcaggaactttccgtggcgcaggttcgcgtggaaggcgatatcaaatccaccgatcagatcgccgggaaactcgacgtacgcgttgagcaaattagccagccggatgtaaatatcaacctcgtcaccctgaatgccaaaggcagcgaaaagcagcacgagctacagttgcggattcagggggagcctgtctccgggcagcttaatctggcaggaagttttgatcgcaaagaagaacgctggaagggaactcttagcaatacccgcttccagacgccggttggcccgtggagcctgacccgcgatattgcgctggattaccgcaataaggagcaaaaaatcagcatcgggccacactgctggcttaacccgaatgcggaactgtgcgtgccgcaaactatcgatgcgggggccgaagggcgtgcggtggtgaatctcaaccgcttcgacctcgccatgctgaaaccgtttatgccagaaaccactcaggccagcggtatcttcacgggtaaagcggacgttgcctgggacaccacgaaagaggggctgccgcagggcagtatcacccttagcgggcgtaacgtgcaggtaacgcaaaccgtcaacgatgcggcgctgcccgtggcgtttcagacactgaatctgacggcggaattgcgtaacaaccgtgccgaattgggctggaccatccgcctgaccaataacggccagtttgatggacaggtgcaggtgaccgatccgcaaggccgccgtaatcttggtggcaacgtcaatatccgtaacttcaaccttgcgatgataaaccccatctttacccgtggggaaaaagcagcggggatggtgagtgccaacttgcgtctgggtggtgatgtgcaaagcccgcagttgtttggtcagcttcaggttacgggtgtggatatcgatggcaactttatgccgtttgatatgcaaccgagccagcttgcggtcaactttaacggtatgcgcagcacgcttgccggtacagtacggacccagcagggtgaaatctacctgaacggtgatgccgactggagccaaattgaaaactggcgggcgcgggtaacggcgaaaggcagtaaagtgcggatcaccgtgccgccgatggtacgaatggatgtaagcccagatgttgtattcgaggctacaccaaacctgtttaccctcgatggtcgcgtggatgtcccttgggcgcgcatcgtggtgcacgatctgccggaaagcgcagtaggcgtctccagcgatgtggtgatgcttaacgataacctgcaaccggaagagccgaaaacggcgagcattccgattaacagtaacctgattgtccacgttggcaacaatgtgcgcattgacgcctttggcctgaaagcgcggctgacgggcgatctcaatgtcgttcaggacaaacaagggctgggtctgaacgggcagatcaacatccctgaagggcgcttccatgcctatggtcaggatctgattgtgcgtaaaggtgagttactgttctctggtccgccagatcaaccgtatcttaatattgaagctattcgtaacccggatgctacagaagacgacgtaatcgccggagttcgcgtcactggtctggcggacgaaccgaaagcggagatcttctctgacccggcgatgagccaacaagctgccttgtcttatttgctacgtggacaagggctggagagcgatcagagcgacagtgcggcaatgaccagcatgctgattggtttgggggttgcgcaaagtggccagattgtgggtaaaatcggcgagacgtttggcgtaagcaatttagcgctcgacacccagggagtaggcgactcctcccaggtagtggtcagcggctatgtattgccaggtctgcaagtgaaatacggcgtgggtatatttgactctatagcaacactcacgttacgttatcgcctgatgcctaagctatatctggaagccgtgtctggtgtagaccaggcactggatttgctctatcagttcgagttttaacaatgcgaatatttgtctacggcagtttacgccacaaacaaggcaacagtcactggatgaccaatgcccagttactgggcgatttcagtatcgataactaccagttgtatagcctgggccactatccaggcgcagttccggggaacggaacggtacacggtgaagtttatcgtattgacaacgccacgctggccgaacttgatgccttgcgcaccaggggcggtgaatacgcgcgccagttgattcagacgccgtacgggagtgcatggatgtacgtttatcaacgacccgtcgatggattaaagctaattgaaagcggcgactggttagacagggataagtaaccatatgcatacgccaccttcgggtggcgttgttttttgcgagacgactcgcattctgttttgtaattccctcaccttttgcttttctctccgagccgctttccatatctattaacgcataaaaaactctgctggcattcacaaatgcgcaggggtaaaacgtttcctgtagcaccgtgagttatactttgtataacttaaggaggtgcagatgcgtattaccataaaaagatgggggaacagtgcaggtatggtcattcccaatatcgtaatgaaagaacttaacttacagccggggcagagcgtggaggcgcaagtgagcaacaatcaactgattctgacacccatctccaggcgctacagccttgatgaactgctggcacagtgtgacatgaacgccgcggaacttagcgagcaggatgtctggggtaaatccacccctgcgggtgacgaaatatggtaaagaaaagtgaatttgaacggggagacattgtgctggttggctttgatccagcaagcggccatgaacagcaaggtgctggtcgacctgcgcttgtgctctccgttcaagcctttaatcaactgggaatgacgctggtggcccccattacgcagggcggaaattttgcccgttatgccggatttagcgttcctttacattgcgaagaaggcgatgtgcacggcgtggtgctggtgaatcaggtgcggatgatggatctacacgcccggctggcaaagcgtattggtctggctgcggatgaggtggtggaagaggcgttattacgcttgcaggcggtggtggaataaggtgtgtttatttatcgcgggcataaaaaaacccttactaaccgaagcccggcgttcagggttattacgccagaagaacttatttattctttgcgcgctcgaaggaggcaacgatttcagctttagcggcttctgcgttttcccaaccttcaactttcacccacttgcctttttcgaggtctttgtagtgctcgaagaagtgagcgatttgcgctttcagcagttcaggcagatcgttaacgtctttaatgtgatcgtattctttgctcagcttgctgtgcggaaccgcaaccagtttcgcatcttcaccggcttcgtcggtcattttcagaacgccaaccggacggcaacggatcacagaacccggctgcagcgggtacggagttgggaccagtacgtcaaccgggtcaccgtccagagacagggtgtggttgatgtaaccgtagttgcatggatagaacatcgcggtggacatgaagcggtcaacgaacagtgcgccgctctctttgtcgatttcgtatttgatcggatctgcgttagccgggatctcaataacaacgtagatgtcttccggcagatctttacccgcagggacgttgagtaagctcatgtctgtttcctttaaaaatatgtggcaaacaagtgccgagtattatagccaactcgcgccgaatgtcttcgcttgttttcgtcttcattttcctttttcaccagttttaagacggtatacagagcaggaaaatccataaccgtagccgcatttttcatagtgagatgaaagcgattacaaacttgtgattaacgttttatttacttttttgaagtgtgatgtaacgcaatctgttacataacgaattgtctatagttttttcgcgaacatcttttaaccaataataactaccccgacgaggacaaccctatgtggaaacgcttacttatagtctctgcagtcagcgcagccatgagctctatggcgttggccgctccattaaccgttggatttagccaggtcggaagcgaaagtggctggcgtgccgcagaaaccaatgtggcgaaaagtgaagccgaaaagcgcggaatcacgttgaaaattgccgatggtcagcaaaagcaggaaaaccagattaaagcggtacgttccttcgttgcacaaggggtggatgcgatctttatcgctccggtggtcgcgacaggttgggaaccggtattaaaagaggcgaaagatgccgaaatcccggtattcttgctcgatcgttccattgatgtgaaagacaaatctctctatatgaccaccgtcactgccgacaacatcctcgaaggcaagttgattggtgactggctggtaaaagaagtgaatggcaaaccatgcaacgtggtggagctgcagggcaccgttggggccagcgtcgccattgaccgtaagaaaggctttgccgaagccattaagaatgcgccaaatatcaaaatcatccgcagccagagtggtgacttcacccgcagtaaaggcaaagaagtcatggagagctttatcaaagcggaaaacaacggcaaaaacatctgcatggtttacgcccataacgacgacatggtgattggtgcaattcaggcaattaaagaagcgggcctgaaaccgggcaaagatatcctcacgggttccattgacggtgtaccggacatctacaaagcgatgatggatggcgaagcgaacgccagtgttgaactgacgccgaatatggcaggtcccgccttcgacgcgctggagaaatacaaaaaagacggcaccatgcctgaaaagctgacgttaaccaaatccaccctttacctgcctgataccgcaaaagaagaattagagaagaagaaaaatatggggtattgagggttgctatgcctgatgccgattcgtaggccggataaggcgctcgcgccgcatccggcgatggtgcactgaagcctgatgcgacgcttaccgcgtcttatcatgcctactgggagcacgctttacaccgggggaaaccatgacgaccgaccaacaccaggagatcctccgcaccgaaggattaagtaaatttttccccggcgtcaaagcgttagacaacgttgatttcagcctgcgccgtggcgaaatcatggcgctgctcggtgaaaacggggcgggaaaaagtacgctaatcaaagcattaactggtgtataccacgccgatcgcggcaccatctggctggaaggccaggctatcagtccgaaaaataccgcccacgcgcaacaactcggcattggcaccgtctatcaggaagtcaacctgctacccaatatgagcgtcgctgataatctatttataggccgcgaacccaaacgcttcggccttctacgccgcaaagagatggaaaagcgcgccaccgaactgatggcatcttacggtttctccctcgacgtgcgcgaaccgctcaaccgctttagtgtcgcgatgcagcaaatcgtcgctatttgtcgggctatcgatctctctgccaaagtgctgatcctcgatgaacccaccgccagtctcgacacccaggaagtggagttactgtttgacctgatgcgtcagttgcgcgatcgcggcgtcagcctgatttttgtcactcactttctcgatcaggtctatcaggtcagcgatcggatcaccgtcttacgcaacggcagtttcgtaggctgtcgggaaacgtgcgagctaccgcagatcgaactggtaaaaatgatgctggggcgcgagctggatacccacgcgctacagcgtgccgggcgaacattgttgagcgacaaacccgttgccgcgttcaaaaattacggcaaaaaaggaacgatcgcaccgtttgatctcgaagtacgccccggcgagatcgtcggtctggctggattgctgggaagtggacgtaccgaaaccgccgaagtgatcttcggtatcaaacctgctgacagcggcacggcgttgatcaaaggcaaaccgcaaaacctgcgaagcccacatcaggctagcgtactgggcattggcttctgcccggaagacaggaaaaccgatggcatcatcgctgccgccagcgtgcgggaaaatatcatcctcgctctccaggcccagcgcggctggctacgtcccatttcccgcaaagaacagcaagagattgccgaacgctttatccgccagcttggcattcgcacacctagtactgaacaaccgattgaatttctctccggcggcaatcagcaaaaagtgttgcttagtcgttggctactgacccgaccgcaatttctgatcctcgatgagccaacccgcggcattgatgttggtgcccacgccgagatcatccgcctgattgaaacgctatgcgccgatggtctggcgctgctggtgatctcctccgaactggaagagctggtgggctatgccgatcgggtgattatcatgcgcgatcgcaaacaggtggcggagatcccgctggcagagctttccgttccggcgatcatgaacgccattgcggcgtaaggagaacagtgtgatgcctcaatctcttccggacaccactacgccaaaaaggcgctttcgctggccgacggggatgccgcagctggtagcactattgctggtgctgctggtcgatagcctggtagccccgcatttctggcaggtggtgcttcaggatgggcgtttgttcggtagccccatagacattcttaaccgtgcagctcccgttgcgttactggcgattggcatgacgctggtgatcgccaccggtgggattgatctctccgtaggggcggtgatggctatcgccggagccacaacggctgcgatgacggtcgcgggattcagcctgccgattgttttgttaagcgccctgggcaccggcatcctggcgggattgtggaacggcatactggtagcgatcctcaaaattcagccgtttgtcgccactctgatcctgatggtcgccgggcgcggcgtggcgcaactgatcaccgccgggcagatcgtcacgtttaacagcccggatctcagttggttcggcagtggaagcctgttgttcctgccaacgccggtcattatcgcggtgctgacgcttatcctgttctggctgttgacccgcaaaacggcgctggggatgtttatcgaagccgttggtatcaacattcgggcggcaaaaaatgccggggtaaacacgcgaatcatcgtcatgctcacttatgtgttgagcgggctgtgtgcggcgattgcgggcattatcgtggcggcggatattcgcggtgccgatgccaacaacgctgggttatggctggagctggacgccattctcgcggtggtgattggcggcggaagcctgatgggcgggcgctttaacctgctacttagcgtggtgggggcgctgattattcaggggatgaacaccggaattttgcttagcggctttccgccagagatgaaccaggtggtgaaagcggtggtggtgctttgcgtgctgattgttcagagccaacgctttatcagtctgattaaaggagtacgtagccgtgataaaacgtaatttgccactgatgatcaccatcggcgtctttgtgttgggttatctttactgcctgacccagtttcccggttttgcttccacaagagtgatctgcaatatcctgaccgataatgcctttcttgggatcattgccgttggcatgacctttgtgatcctcagtggtgggatcgatctctccgtcggtagcgtgatcgcctttactggcgtgtttctggcaaaagtgattggcgatttcggcctcagcccgctgctggcgtttccgctagtgctggtgatgggctgtgccttcggcgcatttatggggcttctgatcgacgccctgaagatcccggcatttatcattacgcttgcggggatgttctttttgcgcggcgtcagctatctcgttagcgaagagagcattccgataaaccatcccatttatgacacgctcagtagccttgcgtggaaaatccctggcggcggtcgcttaagtgcgatgggactgctgatgttggcggtggtggttatcggcatattcctcgcgcatcgtacccgttttggtaatcaggtatacgccattggcggcaacgcaacgagcgcgaatctgatggggatttccactcgcagcaccactattcgcatttatatgctctccaccggactggcaacgctggcggggattgtcttcagcatttatacccaggccggatatgcgctggcgggcgtaggtgtggaactggatgctatcgccagtgtggtaattggcggtacgcttttgagcggtggcgttggaacggtattagggacgctttttggcgtggcgattcagggactgattcagacttacataaactttgatggcacgctgagttcctggtggacgaaaatcgccatcggtattttgttgtttatttttatagcattacagcgtggattaacggtgctgtgggagaatcgtcagagtagcccagtgacaagagtcaacattgcgcagcaataaaaacgcctctccgtgtggagaggcgcaggagattacgcgtccgggaactcacggataaagcgttcgacatcttcaaccatatggtcgttgccgacaaagaaactacggcgctggtgcagggtttccgggatgatatccagaatacgctctttgccatcgctcgctttaccgcccgcttgttccgccaggaatgccatcgggttgcactcatacagcaaacgcagtttgccgtccgggtggctggcggtgcttgggtagagataaataccgcctttcagcaggttacggtggaaatccgcgaccagactaccgatataacgactggtataagggcggttggtggatttatcttcttcctggcagaatttaatgtacttcttcaccccgttcggaaacttaatgtagtttccttcgttgatggagtaggttttgcctttctccgggaagcgcatccgttcctggcacaggcagaaaacgccgaggctaggatcgtaagtaaaggcgtgaacaccgcatccggtggtgtaaaccagcatggtagaggagccgtataccacgtaacctgccgcaacctgtttgttaccaggctggaggaaatcttcttccgttaccggcgtgccaacaggcgtaacgcggcggtagatggagaaaatggtaccgacagagacgttaacatcgatgttggagctgccatccagggggtccatcagcaccacgtattttgcgtgttcacagccttcaaagacgacaatctcatcttcttcttcagaggcaatgcccgcaacgatatcgcgtgctttcagtgcggctttcagtttttcattagcgaacaagtcgagtttctgctgaacctcgccctgcacgttctcagcaccgctggcacccaggatatcaaccagtcctgctttgttgatatcgcgatggataatcttggcgcccagttttattgcgctcagcaaagcagtgagctcaccggtagcatgagaaaactcgtgctgcttttcgacaataaattcacctaacgttttcataaaactttccctgcaatgtttatggagtaaagcgaccgcaacaatcttaacaaataatctcaatgttgcgctcaggtgaatcgcgccagcaaattacggattatcctgaaatgcgtttctcacttgcccgacatatgcgtaaaatgagcggcagattaaaaaaggatagtgacgtatgcgcattcatattttaggaatttgtggcacatttatgggcggtctggcgatgctggcgcgccagttaggccatgaagtaacgggtagcgacgccaatgtgtatccgccgatgagcaccttacttgagaagcaaggcattgagctgattcaggggtacgatgccagccagctcgagccgcagccggatctggtgattattggcaacgccatgacccgtggaaatccgtgtgtggaagcggtactggaaaaaaatatcccttatatgagtggtccacagtggctgcacgattttgtgctgcgcgaccgctgggtgctggccgttgccggtacacacggcaaaaccaccaccgcgggaatggcgacctggattctggaacagtgtggttacaaaccgggctttgtaatcggcggtgtgccggggaactttgaggttagcgctcatctgggcgaaagcgacttctttgttatcgaagcggatgagtatgactgcgccttcttcgacaaacgctctaaatttgttcattactgcccgcgtacgctgatcctcaacaaccttgagttcgatcacgccgatatctttgacgacctgaaagcgatccagaaacagttccaccatctggtgcgtatcgttccggggcagggccgtattatctggccggaaaatgacatcaacctgaaacagaccatggcgatgggctgctggagcgagcaggagctggtgggtgagcagggtcactggcaggcgaaaaagctgaccaccgatgcttccgaatgggaagttttgctggatggcgaaaaagtgggcgaagtgaaatggagcctggtaggcgaacataatatgcacaatggcctgatggcgattgcagcggctcgccatgttggtgtagcgccggcagatgccgctaacgcgctgggtagctttattaatgctcgtcgccgtctggagttgcgtggtgaagcgaatggcgtcacggtatatgacgattttgcccatcacccgacggcgattctggcaacgctggcggcgctgcgtggcaaagttggtggtacggcgcgcattattgctgtgctggagccgcgcagcaataccatgaaaatggggatctgcaaagacgatctggcacctagtttaggtcgtgccgatgaagtcttcctgctgcaaccggcgcatattccgtggcaggtggcagaagtggcagaagcctgcgttcagcctgcacactggagtggcgatgtggatacgctggcagatatggtggtgaaaaccgctcagcctggcgaccatattctggtgatgagcaacggcggttttggtgggatccatcagaaactgctggatgggctggcgaagaaggcggaagccgcgcagtaattcggccttagccagatatagtatgcgtaggccggataaggcgttcacgccgcatccggcatttgagcatagtgcctgatgcgacgcttgatgcgtcttatcaggcctacaggtgcaccgtatccggcaaaccatactcacatcaacaacgaaaattacccttcgttctccgctaactcgcgcagatactggaaaatctggcgtgcggatttcggcggcttattcccttctttctctttcttcgcgttgcggatcagagtacgcagttgctgacgatcggcatcgggccacagatttaatacctcagcgatggcgtcatcaccttgatcgatcagacgatcgcgcaggttttccagtttatggaacagcaccacctgctggttgtgacggtttttcagcttatccagcgcctgacgaataggctctacgtcgcgctggcgcagcatcttaccgatgagctgcaactggcggcggcgaccttccatcttaatacgctgggcgagctcaatagccgcgcgcagatccgcatctaacgggatcttatccagcgcgtttttccccagatcaacaatttccgcgccaaggcgttttagctcctcggcatcacgtttaatttcacttttactgacccagataatttcatcgtcttcgtcttcgatgtcatcaccgggaacgtcgtcgagccagtcttcgggctgcttagtcatctcaggctccttaaaaaaagaggctaatgttaccagttaagatgcgcactgaaaaacggttctctgttagacttcagagaaactctctacattatggcacttgcaatgaaagtaatctctcaagttgaagcgcagcgcaagattctggaagaagcagtttccactgcgctggagttggccagtggcaaaagcgacggtgcggaagttgccgtcagcaagaccaccggcattagcgtaagcacgcgttatggtgaagtggagaatgttgaattcaatagcgatggcgcgctggggatcactgtttatcaccagaaccgcaaaggtagcgcaagttccaccgatttaagcccgcaggccattgcccgtactgtacaggcggcgctggatattgcccgttataccagcccagatccctgtgccggcgtggcagacaaagagctgctggcctttgacgcaccagatctcgacttgttccaccctgcggaagtttccccggatgaagccattgaactggcggcccgcgcagaacaggcggcattgcaggcggacaaacgcatcaccaataccgaaggtggcagctttaacagccactacggtgtcaaagtttttggcaacagccacggcatgttgcagggttactgcagtacgcgtcatagcctctccagctgtgtaattgccgaagaaaatggcgatatggagcgtgattacgcctacaccattggtcgtgcgatgagcgatctgcaaacgccagagtgggttggggccgactgtgctcgccgtactttaagccgtctgagtccgcgtaaactctccaccatgaaagcgccagtcatttttgccaatgaagtggcaaccgggctttttgggcatctggtgggggcgatagcgggtggaagcgtttatcgtaaatctaccttcctgctggatagcctgggtaaacaaattctgccggactggctgaccattgaagagcatccgcatctgctgaaagggctggcgagcacgccattcgacagcgaaggtgtgcgcaccgagcgtcgcgatattattaaagatggcatcctgactcagtggctgctgaccagctacagcgcgcggaaactggggctgaaaagcaccggacatgcgggcggtattcacaactggcggattgccggacaaggtctaagcttcgagcagatgctcaaagagatgggcaccgggctggtggtgacggaattgatgggccagggcgtgagtgccattaccggtgattattcccgtggtgcagcgggcttctgggtagagaatggcgaaattcagtatccggtgagcgaaatcaccatcgcaggtaatttaaaagatatgtggcgcaatattgtcaccgtcggtaacgatattgaaacacgcagtaatatacagtgtggttctgtgctgttgccggagatgaaaatcgccggacagtaaaaaaactggcgcgacctgccgcgctataaactaaaaaattacacaaaatcattcgcactgcatcgagacggaaagtgaatgagggccggggagcgtactcgcagtacgtgacccggtcgaatgagcgtagtcgtcgatgaggcagtgtgaaggatgaagtgtaaataaaaaaggaactattcttgcagtctcctcgttggtattcagttcggcgtcatttgctgctgatctcgaagacaatatggaaaccctcaacgacaatttaaaagtggtcgaaaaagccgataacgcggcgcaagtcaaagacgcgttaacgaagatgcgcgccgcagcgctggatgcgcaaaaagcaacgccgccgaagctcgaagataaaagtccggacagcccggaaatgaaagatttccgccacggtttcgacattctggtcggtcagattgacgacgcgctgaagctggcaaatgaaggtaaagtaaaagaagcgcaggctgctgcagagcaactgaaaacgacccgcaatagttatcacaagaagtatcgttaattcctcatttccctgttgcctgcactcaggtaacagggaacttatcatcgcaaatgatgcaccacctgattgctgctgccgcgccagatcagggaagggtcttttaaatcctgcacaaatttgccgtcgaccagcacgttaatcaaatcaacaacctgcatttgcgcagcgttgagttcgtcgagtttatagcctgtccacacccagatgtctttacccggacactcggcgcggatgcgttgtaccagtttcagaatatccggcacgttttgcggatgcagcggatcgccgccggagagggaaataccctggcgtttgatacgagtgtcattcagatcgttaatgatctggtcttccattgctttggtaaatggctgaccggaatttacccgccatgtgcttttgttatagcaaccggggcattcatgaacacacccggagacaaacagggtgcaacgagtgccggggccgttgacgatgtcgacaggatagtactgatgataattcattatttcgcctggcttatcagtccgcgtgtaggctgcatccggtaatcaatgcctgatgcgacgctgtcgcgtcttatcagacctggagcaattgccaaatgtaggccggataaggcgtttacgccgcatccggcatttgcttagctcagagtgaagattaacctatctgcccattccccaaatgtttaacgcggcgcttaacttcttcctgcttaccagcgttaaacggacgtgcatccgggctacctaaatatccgcacacgcggcgagttacgctcacacgggaggcgtcatggttaccacatttcgggcaagtgaagcctttgctggtgcactcgaactcaccggtaaagccacactcgtagcactcatcaatcggtgtattggtgccgtaatacggtacatgctgatagctgtaatcccagacatcttccagcgccttcaggttgtgctgaatgtttggatactcgccgtagcaaatgaaaccaccgttcgccagcggcgggtaaggcgcttcaaagtcgatcttgtcgtacgggttcaccttcttctccacatcgaggtggaaactgttggtgtagtaacctttatcggtcacgcccggcaccacgccaaactcagcagtatcgagacggcagaagcgatcgcacaggttttcactcggcgtgctgtagagactgaaaccataacccgtttcttctttccactgatccactgcctgacgcagacgttcaacaatggcgatacctttcgcgcgaagctgctcgttgtcgtaaacatgctcgccgccgaacagcgcgttaatggtttcgtggatgccgatgtaacccaggctaatagacgcacgaccgtttttgaagatttcagaaacatcatcgtcagcattgagacgcacgccacaagcaccttccatatagaggatcggggccacgcgcgctttcacgccttcgagacgagcgatacgggtcatcagcgccttacgtgccagcaccagacgttcatccagcagcttccagaaggtggcttcatcgccttttgcttccagagcaatacgcggcaggttcaggctgatcacgccgaggttgttacgaccatcgtggatctgctcgccgttttcattttcccacacgccgaggaagctgcggcagcccatcggagttttaaagctaccggtgactttcactacctgatcgtagttcaggatatccggatacatgcgcttgcttgcgcactccagcgccagctgtttgatgtcgtagttcggatcgccttttttatggttcaggccatcgcgaatcgcaaacaccagtttcgggaacaccgcagttttacggtttttaccgaggcctgcgatacggttacgcaggatgctttcctgaatcaggcggctttcccagctggtgcccaggccaaaaccaaaggttacaaacggcgtctgaccgttggcggtgtgcagggtgtttacttcgtactccagactctggaaggcatcgtagcactctttgatggttcgagagttagcgtagccttcggcgtccgggatgttccactcttctgcggtcttgcgatgtttgttgtagctggcagtgacaaacggtgccagcacttcatcgatacggttaatggtggtgccgccataaatatggctggcaacctgagcaataatctgcgcagttaccgcggttgccgtagagatgctcttcggcggttcaatctcggcgttccccattttaaagccctgggtcagcatgcctttcaggtcgatcaacatgcagttgaacatcgggaagaacggactgtaatcgagatcgtgatagtgaatatcgccacgctcatgtgcctgcaccacgtcacgcggcagcaggtgctgacgtgcatagtgtttagccacgatcccggccagcaggtcgcgctgggttggaatcaccttgctgtctttgttggcgttttcgttgagtaagctggcgttggtctgctcgaccagaccacggatctcctggttcaggcgaccgcgtttttcacgttcaatgtcgcgatcgtgacggtactcgatgtaagcacgagccagttgtttgtatggaccactcatcagctgattttcaactgcggtctggatctcattgatatccacctggttgcggccctgcatctgctcgctgacaaccgcggcaacagtggcgcaataatcggcatcatcgacttccgctgctttagctgcacgcagaatcgcttctttgatgcgctcacttttaaacggcactttgcagccgtctcgtttcatcacatgcggtgtcatgatcgctccatatttttaagaacaggttatccacagaaattgggaaaggcgttttccggttttttcgtttcgttttccggtgctttccgcaatcgccatccgcttatccacaacgccgcacctttttcgtggggagctgtagtagcaattatagtcgattaatacaacatattgggttgggacgcattttaaagtctatatatagtgctttgcatcaaggatgtttgagctttttttgatgtagctcaaagtaaaaagcagagcgtacggatgacgggcgctacagcgatatgtaaattttttaatgaatttgctggttgaaaaatcaacaaaaacaacatactgacagacaaaaccccggaatgaccggcattaccggggcttagggaagatttacttctgtaaccaccagacagcctcaaaaggccgtaaattcatggcacagggttgtggactggcttcttcgtagttatgcatcacaagctgccagttgccgcgcatttgccctgcctgccagggttggatctcacggctaaggttggcaatgaccagcaaggtttgccccttccattcacggcgatagcaccacaatacagggctgtttggcagcagatcctggtaattgccccatgtcaggatggcttcctgcttacgcagtgcgattaacttttggtaggtgtaaaacacgctggaatcatcggccagcgcggcttctacgttgatttgttgatagttatcgcccaggccaatccacggttcgccagccgtaaacccggcattatcgccgttgctccattgcatgggcgtgcgactgttgtcacgggatttactggcgaggattgccaataactcgtcggcatcacgcccatcgttgcgcagctcggcaaacatattgaggctctctacgtcgcgatagtcagtaatgcgcgtgaaatgcgggttggtcatgccaatctcttcgccctggtagatatacggcgttccctgcatgccatgcagcaccatcgccagcatttttgccgcaggcacgcggtattcaccttcatcaccaaagcgagaaacaatgcgcggctgatcgtggttacaccagaacaaggcattccatgctacgttgtgcattccttgttgccagtggcggaacaatgttttcaacgccacaaagtcaggtttagccagcgtccatttttcaccaccgggataatcgaccttcaggtgatgaaaattaaaggtcatgctcaattcactgcctgtcagagccgcgtatcgctggcaatgctcaaggctggtggaggacatttcacctacggtcattaacccgcgtggcgtaaacacatcgcggttcatctcgtgcaaaaactcgtgtgctcgtggcccgtcggtgtagaagcgacgcccgtcgccgtccaggtcttcagggaaacgcgggtctttggagatcagattcaccacatccaggcgcaacccgtcgaccccacgatcggcccagaactcacagacttttttcagctctgcgcgtaccgctggattctcccagttgagatccgcctgttctggtgcaaagagatgcaaatagtactgttcgctttccgcatgccagcgccacgcactaccgccaaatttactacgccagttgttcggtggcgtttctggttctccatcgcgccagatataaaactggcggtaagggctttctttgttcagcgcctcgcgaaaccaggcatgttgggtagaggtatggttaaacaccatatcgagaatgatacgaatcccgcggctttttgcctgcgtcaccagttcgtcaaaatcgtccagcgtgccgtaggtgggatcaatcgccgtatagttcgctacgtcgtaaccgttatcgacctggggagagacataaaagggggttagccagatggcatcaacgcccagtttatgcagatagtccaggtgttggataacgccacgtaaatcgccggtaccgctacccgtggtgtcctgaaaactctttggataaatctggtagataacgccgttttgccaccagtggggaagatgagtcattacgttattcctgcgaatgcgagggggcgcaattgcgccccgaagaaaattaaacaatgtccagcgtgcccaggcggtatttccgctgatagataaagctggtgagtacaatcgggatgatgatggcgatagccattgccagcgcaaacacctgccagtagctcggttgaatgctgagaattcccggcaggccgcctacgccgatgccattcgccataacgccgttcaggccgcatagcaatcctgccagaccagaaccaatcatcgcgcacagcatcgggaagcgatatttcaggttgatgccgtacattgcaggctcagtgaccccaagccaggcggagatagcggcaggcacggagatctcgcgttcattgtgcttgcggctggaaatgataatgcctatcacggcggagccctgagcgatattgctcagcgcaatcagcggccacactggcgtaccacccatgctttgaatcatctgcaaatcaatagcaagcgtggtctggtgtacaccggtgatcaccagcggggcgtacaggaagccaaacaatgctgcgccaatcggagcaaagctgccggtcatcaggtgacgtaccgcaaaggcaacgccatcgccaatcatgcgaccaaacggaccaatcagcgcatgggcgaggaacaccgcgaggatcaggctacagacgggtaccaccaccagatagaggtaatccggcacgatgcgtttaaggcgagtttcaataacgcccagcgccagtccggctaacagtgccgggatcacctgcgcctgatagcctactttggcgatgctgaacatgccaaagtcccacacttccggcagctgctgcccgagcagataagcgttcatcagctgtggagaaaccagtgtcacgccaagcacgataccaaggatcggcgtgccgcccatttttttcaccgcactccagcaaataccgaccggcaggtagaagaagatcgcttcaccgatcaaccacagaaaatcgtagatcgtttgcagggaagggtacatttgcgccagcgtctgaccgttgctcatgggcaaatcgccgatcacattgcgaaaaccgaggatcaaaccgccgctaatcaacgcgggcagcaacgggaagaagatcaccgcgaaatgagagatcaactgctcatgccatttcatattatgccgggcggctttttttacctgctctttatcaacctgcgcctgtccggtactcgcaatcagtgcttgatagtaatcacccacgttggtgccaatcaccacctgaaattgcccggcattggtgaaacagcctttcaccatagggagttgctcaatttctttcggtctggcattggccggttggttgaggacaaagcgtaggcgagtaatacagtggctcaccgtcgcaatattgccgcgcccgccgaccagttcaatcaaccgatcgatatccgtttggtttattttgctcatcataaagccccatggcagatgacatttttggttggctgcagaatatattgcgcggaaaaatttaaaaacgggaacgttcccgaaacgcagcgaagatcacaatttatcgttcaggaaacgatcaggacagggtggcggggatgatgatttgttgcggttcgctgcgcccggttacctgcgcgatcaactggcaagccgcctggcgtccagcttcggcgtaaccgggatctacggttacgatctccggatggaggaatttcattaacggcgtattaccgacgctcgccagttgcaaggtgtcgatgcgttgctcttgcaggtatttacttgcgccaagtgccagcgtgtcggttgcgcacagtaaggcggtagtttcaggcgtaatcacttttgcaacgttctcatagccttgcttcatagcaagccctggcagggcggcaacgggatgcagtttatgcgctttgcagaacgccaggtaggcttcgtgacgtcgcttaccggttgtcacgtcactgtgcggcacgccgagataactgatattacgatgcccctggtcatacagccgttgcatcaggattttgattgccccttcgtcgtcataacagacgctagcaaagccttttgcgtcacgcgccagcagaaccaggctactctgccagtgggctaacatttcttctgttatgccagtaaaaccgaacagcactacgccgtcgatattacgccgtttcagcactcccaaatgttcggcaactaattgcggggaaaactgactttccatcatgattgggtcgtaaccttgttcatagaacgctggcagcatggtttgaacggcgagattttcactcaagctatccagacgggtaacaatgatggcgaccactttatcgctttgcccacgcatagcgcgcgcagagcgggaaggggaaaatccatgctgattcatcactgcttcaacacgctcgcgggtgagctggctcacgccgctttcgttattcagcacccgggaaactgtagatttccccacgccgcttaagcgcgcgatatctttgatggtcagccgattttgcatcctgttgtcctgtaacgtgttgtttaattatttgagcctaacgttacccgtgcattcagcaatgggtaaagtctggtttatcgttggtttagttgtcagcaggtattatatcgccatagatgctacgaatattattggattctccttattatttgcggcgcttttttcacttaccggaggttatatggaacctgatcccacgcctctccctcgacggagattaaaacttttccggtaagcccgtcttttcacggcgttaccggatgcgtaaggccgtgacgttttaacgtccctgctcagctttattaccttcaggtaaggcttcgccacgcctgaagacatttctgtactgtttcagacagtgcggagggactccttatgtttaaagaaatttttacccggctcattcgccatttaccttcccgtctggttcatcgtgatccattgcctggcgcgcagcagacagtgaatacggtggtcccgccgtccttaagtgcgcattgcctgaaaatggcggtgatgcccgaagaagaattgtggaaaacgttcgacacccatccggaagggttaaatcaggcggaagtggaatctgcccgcgaacaacatggtgaaaataaattacccgcacaacaaccgagcccgtggtgggtacatttatgggtctgctatcgcaacccctttaatattttactcaccattctcggcgctatttcttacgccacggaagatttatttgctgcgggcgttatcgcgctaatggtcgctatttctacgttgctgaactttattcaggaagcacgttccactaaagcggcagatgccctgaaagcgatggtcagcaatactgcgacggtgctgcgcgtaattaacgacaaaggcgaaaatggctggctggagatcccgatcgaccagctggtgcccggcgatattataaaactggcggcgggagatatgatcccggcagatttacgtatcttgcaggcgcgggatctgttcgtcgctcaggcgagcttaaccggtgagtctctgcccgtagaaaaagccgctaccactcgccagccggagcacagcaatccgctggagtgcgacacgctgtgttttatgggcaccaccgtggtgagcggcacggcacaagcaatggtgattgctacaggtgccaatacctggtttggtcaactggcggggcgtgttagtgagcaggaaagcgagccgaatgcctttcagcaagggatcagccgcgtcagtatgctgctgattcgctttatgctggtgatggcaccggtggtgctgttaatcaatggttacaccaaaggcgactggtgggaagcggcgctgtttgcgcttagcgtcgcggtaggcctaacgccggaaatgttgccgatgattgttaccagcacgctggcgcgcggcgcagtaaagctgagcaaacagaaagtgatcgtcaaacatctggatgctattcagaactttggcgcaatggatattctgtgcactgataaaaccggcaccctgacgcaggataaaattgtgctggagaatcataccgatatctccggtaaaaccagcgaacgcgtgctgcatagcgcgtggttgaacagtcattatcagaccggacttaaaaacctgctcgatacagcggtgctcgaaggtacggatgaagagagtgcgcgcagcctggccagtcgttggcaaaaaattgatgagattccgtttgatttcgagcgtcgccggatgagcgtggtagtggcagaaaataccgagcaccatcagctggtttgcaaaggtgcattgcaggaaatcctcaatgtgtgtagccaggtgcgtcacaatggcgagattgtgccgctcgatgacatcatgctgcgtaagattaagcgggttactgatacgctgaatcgtcaggggctgcgcgtggttgcggtggcgacgaaatacctgccagcgcgtgaaggagattaccagcgggcggatgaatccgacctgatcctcgaaggatatattgcttttcttgatccgccaaaagagacaaccgctccggcactgaaggcattaaaagcgagtggaattaccgtaaaaatccttactggcgacagtgagttagttgcagcgaaagtgtgccatgaagtggggctggacgcgggagaggtggtcattggtagtgatattgaaacgctatctgacgacgaactggcaaatcttgcacagcgtaccacgctgtttgcccgcctgacgccgatgcataaagaacgcattgtgaccttactgaagcgcgaagggcatgtggttggctttatgggcgatggtattaatgatgcgcccgccttacgcgctgcggatatcggcatttctgtggacggcgcggtagatattgcccgtgaagcggctgatatcatcctgctggaaaaaagcctgatggtgctggaagagggggttattgagggacgtcgcactttcgccaacatgctgaaatacatcaaaatgacggcgagctctaacttcggtaatgtgttcagcgtgctggtagcgagtgctttcttgcccttcctgccgatgttgccgttacacttgcttattcagaacctgctgtacgatgtgagtcaggtggcgatcccgtttgataacgtcgacgacgagcaaattcaaaagccgcagcgttggaatccggcggatctggggcgctttatgatcttcttcggaccgatcagcagcatcttcgatattttgacgttttgcctgatgtggtgggtattccatgccaacacgccggaaacgcaaacgctgttccagagcggatggtttgtggtgggcttactgagccaaacgctgattgtgcatatgatccgcacccgccgtgtgccgtttattcagagctgtgcaagctggccgttaatgatcatgaccgtgatcgtgatgattgtcgggatcgcattgccgtttagtccgctggccagttatctgcaattacaggcgctgccgttaagctatttcccgtggctggttgcgattctggcagggtatatgacattaacccagttggtgaaagggttctatagccgtcgttacggctggcaataaagaataaactgggcacgatagccccgattcagattgtagacaaagtgagttttgttcatgccggatgcggcgtaaatgccttatccggccaacaaattcaataaattgcaggaatcacgtaggcctgataagcgtagcgcatcaggcgattttgcgtttgtcatcagacttaatccgggcatgatagcccggatttccatcaagattagcgacgaacagcgatcgcttcgatctcaatcttcacgtctttcggcagacgggcaacttcaacgcaagaacgtgccgggaaggtggcgttgtgttcggtgaagaaggcttcgtaagtggcgtttacggttgcgaagtcgttcagatcttttacaaacacggtagttttaacgatgtcgcccactttcaggccagcggcttcgacgatcgcttttacgttatccaggctctgacgtgcctgtgcagcgacgtctgccggtacttcgcccgttttcggatttaccgggatctgaccggaggtgatgatcatattgcccagatcaacgccctgtacgtaaggaccgatagctgccggtgcattttccgtcgcgatagttttgctcatgatttctcctttattacagcggtaaaaagtctggctcattatagggagccagacttttattaccaaccgcaattaattggccagcaccacattatgggaaaactctttttcacagtatttgcatttgagcgcgatatcattggcgcgttttcgcacggcaaagctggaactaaccggttcggcatggctgatacagttgctgttcgggcagaccagcacattgtcgatgcgctccggcagacttgggcggcttttacccaccacttcatagttgtcgatacggttaaccgtggcttgcggcgcatacaatgccagttgatctacttgatcttcactcaaaaaggtattttcgattttgatcagatctttgcggcccatctcgccagaaggcaggttcagaccaatggtgatgcgctgatccgtttcggtcagcttgaacagactcaacagcttaaaaccgatctgggcggggatatggtcaattaccgtgccgcgtttaatagcttcaacctgcaatttattatcgtgtgtcatctctatttccccttacagtaccagatcgcgattcagaaccagtgccagtaacgcctggcgagcgaaaatcccgttgcctgcctgctggaagtaccaggcgtgtggcgttttatcaacatccgtcgcaatctcatcaacacgcggcagcggatgcagcactttcatattggctttggcgttgtggagatcgctggcgcgaagaacaaactgcgctttcacgttggcgtactcggacgggtccagacgctctttttgcacgcgggtcatgtacaggatgtctacttccgccatcacttcttcaatagagctgtgcagactccatgcgatccctttttcatcgagcatatccagaatgtattgcggcattgccagcgcgtccggcgcgatgaagtaaaaacggttgccgtcgaacttcgctaacgcctgagtcagggagtgaacggtgcggccatatttcaggtcaccaaccattgcgacgtggagattgtccagacgcccctgggtttcctgaatagtgaataagtccagcaaggtttgcgtcggatgttggttggagccatcaccggcattcagtaccggtacattgccggaaaactcggtggccaggcgcgccgcaccttcctgcggatgacgcatcactatcgcatcgacgtaagtgctgataacgctaatggtatcggccagcgtttcgccctttttacccagacttgtattggcgctgtcggagaagcccaccacgctggcccccaggcggtgcatagatgtttcgaaagagaggcgggtacgggtagaggcttcgaagaaacagctggcaatgactttgtgcttcaacagctctggttgcgggtttgctttcagtttcgccgctgtcgccagcaccagattaaggtcatcgcgactaaggtcgtttatggaaatgatatgtttctgatatagcggattagccatcttttatctcctgacgcctgggcaaaaaaaagcccctcgattgaggggctgggaatgggtgatcaacgggaagaaaaacggcaggccagcgtcttttttcagacgcggtaagacaaaatgtcgaacacactgaaccatacatcctcccggcaaattgtccggcattatactcatcgtcagaagcggcgcaagcatttgatgcaatattttgtcagcgcaaacggtttatttgaattaaaagtcaaggtatatgcatttttatttgatgtgattctgcaggggaactgtccttcggtatcaataattgcagacattccctgctttttcctttttcactttcacgcaatcagatatgcattttattccattcatccgacttatagggcggagtgtgaaagcgaacggctaacactattgcttactgctcagggatgcgcgctatcactttaatttcaaaatcaaagcctgccagccatgtaacacccaccgccgtccagtttggataaggtggggcgctaaatatttcatttttcaccgtcatgatgtcttcaaattggttttctggatcggtatggaagctcgtaacatcaatgatatcgtcaaaagtgcatcccgcagctgccagggtcgcatgcaaattatcaaatgccagtctgacttgttgctgaaaatcgggttctggtgttccgtcctctcgacttcctacttgcccggaaacaaacagcaaatcgccggaacgaatagccgcagaataacgatgctcagcatatagactatgtcggccagcagggaaaacagcggttctttctaccatttggttatcctcaagatttacgacatgaacagaagatttctctttaccgggagccgcttttagcggacgacgtgagtaaacaaaacccagacatcatggataatggctgggcttaattgagcgtagtcggttatgcgccaaacgcgccatcaatggtatgcatcgcgccggtaacaaaactggcttctggccctgctaaccatgcgaccataccagcgacctcttccggttgcccatgtcttttgatagccatcaaactatgcaacatatcgcgcattggcccgttggcgggattagcgtcggtatcaattggccctggctggacgacgttaatggtgatcccacgcggtccaaaatcacgggccagcccgcgcgccatgccttgcagggcagatttgctggcggcataagcagccatgcctgcaacaggcatacgatcgccattcacggagccgatgattaagatgcgcccgccttcgggcatctgccgggcggcttcaacagaggcatgataaggagcatgaatattgattttgaaaaggcgatcaatatcgtcggcatttaattccagggcctcgccaaagacgccaatacctgcatttaccaccaggatatccaatgcgccgctcttacgaacgacatcaatgacagcgtctctgtcagcactatctgtgaatactgctgtcgctccagtctcttgtgccaggcgtttagcggcatctttgctccccgcataggtgaatcgtacattggccccatcggtgacgaaacgacgtacgatagcggcaccgataccacgactgccaccgaggatgagaactgtcttacctgtaaaagcgcccataaggactccttgatttattatgtaacatgcattacaaaactgttttaactttctgtcaacaggttttgtaatggtcactaaaaaacaatctcgcgttccaggtcgtcccagacgtttcgctcctgagcaggcaatctctgcggcaaaagtgctttttcaccaaaaaggtttcgatgctgtcagtgttgctgaagttactgattatcttggtattaaccccccgagcctctacgcggcttttggcagtaaagctgggttatttagccgtgtactcaatgaatacgtcggtacggaagctattccgcttgccgatattcttcgtgatgatcgtccggtaggcgagtgcctggttgaggtattaaaagaagcggcgcgcagatatagccaaaacggcggctgcgctggctgtatggttcttgaaggtattcatagtcatgatccacaagcgcgtgatattgccgttcaatattatcacgccgcagaaacgaccatttatgactacatcgccaggcggcatccacaacgcgcacaatgtgtgactgattttatgagtaccgtgatgtctgggctttctgcgaaggcacgagaggggcactctatagaacaactctgtgcaacagctgcaatggcgggggaagcgataaaaactattcttgaggagtgatgcgggccttgacccgaaaggcgggaaagcgcctgccgataagttgtgataagacaataattcacgcgttaaggctagcggaattgattatcttttcgtataacgatagaaatgaaacgttgttttaattaaggagtggaaaagatgatcatcggaaatattcataatcttcagccgtggctaccccaggagttacgccaggcgattgagcatatcaaagcacacgttacggcagaaacgccaaagggcaagcacgatatcgaaggcaatcgactgttttatcttatcagcgaagatatgaccgagccgtacgaagctcgccgtgcggagtaccatgcccgctatcttgacattcagattgtgttaaaaggtcaggaaggcatgaccttcagcacgcaacctgcaggcgcgccggataccgactggttagctgataaagacatcgcatttttgccggaaggcgttgatgagaaaacagttattctaaatgaaggtgattttgttgtgttttatccgggggaagtgcataaaccgctgtgcgcagtgggcgcgccagcccaggttcgcaaagcagtagtgaagatgctgatggcgtgatgacttttcgccgtaaataactcaaggtttacggcgagtttgtgaaaagagcgttttttgatatttttttgtgagtaaaatttgtaatgcttagacgttcttattcactcaaggagttcgtcatgagcaaaataagtgatttaaattattctcaacacattacattagccgacaattttaaacaaaaaagtgaagttttaaatacctggcgtgttggaatgaatgattttgcccgtattgccggggggcaggataacagaaggaatattctttctcctggagcatttttagagtttttggcaaagatatttaccctgggttatgtggattttagcaaacgctccaacgaagcgggtagaaatatgatggctcatattaagtccagttcttattctaaagatactaatggcaatgaaaaaatgaagttttacatgaataatcctgtaggggaacgagcggatagtcccaaggtgattatagaaattagtctttccactatcactactatggggactcgtcaaggacatacagccattatatttccacaacctgatggtagcactaaccgttatgaagggaagtcctttgaaagaaaagatgagagtagtttacacctgattactaacaaggttctggcgtgttaccaaagtgaagctaacaagaaaatagcgcgtctattaaataataatcaggagttaaataatctacagaaattaaataatctacagaagttaaataatctactgaagttaaataatatacaggggttaaataatcctcaggagttaaataatccgcagaatttaaatgattctcaggagttaaataacagccaggaattaaatagtccacaggagttaaatgatccgcaggagttaaataattctcaggacttaaataactctaaggtgagttgtacagttagtgttgattctacgattacgggtttattaaaagaaccattgaataatgcattattagcaataaggaacgaacatctgctattaatgcctcatgtatgtgatgaaagcattagttacttactgggcgaaaaaggtatacttgaagaaatagataagctctacgcattaaatgatcacggaattgataatgacaaagtaggtaacaatgaaattaatgacatcaaagttaacctgtctcatattcttattgattccttagatgatgcaaaggttaaccttacaccggtcatcgatagcattctggagacttttagtaaatccccatatattaatgatgtaagaatactggattggtgttttaataaaagcatgcaatattttgatgatactaaaaagataaagcatgcatgctccgtaataaatcatattaatcttcgcagcgatcagtctaaaatagctgagacattatttttcaatctcgataaagaaccctataaaaatagccctgaattacaggggttgatttggaataagttggttgtatatgtcaatgaatttaacttaagtaatcgagaaaaaacaaatttaatacaaaggctatttgataatgttgagtctatatttaatgaagtacctgtcagcattttagtgaatgatatttttatgaatgatttctttatgaaaaatcctgagatgattaattggtacttccctcagttacttaagagttatgagggtgaaaagatttattttgataatttaaaatatgatttaaatgataatgataaggaatctaataaagaaattttgaagaatcaaccagataatgttatcaaagaaaaactgaataatgaatacaaacttagatttagaatgatgcaaactatcttgcaaagcagagttaatgtattaccatatattaatgaacagcgtttaaataaactaaatccaccggaaaatttacgtatagcaatagaacactttgggtggaagaatagacctatcactgcataaaataatgtgatgccgggatggtttgtatttcccggcatctttatagcgatagcaattatttactgagcgtcgcgaccatcaccgctttgatagtatgcatacggttttccgcctgatcaaaaacaatgctggcggcagattcgaagacctcatcagtgacttccataccgccatgtaggccaaattcttccgccattttcttgccaagcgtcgtttggtcgtcatgaaacgcgggcaggcagtggaggaatttgacctccgggttaccggtcaactgcatcatcttgctgttcacctgatattcacgcagcaatgcaatccgttccgcccatttctcttttgcttcccccatgctcacccacacatcggtatagataaagtcagcaccttcaactcccttcgcgacatcttcagtcagcgtaatattcccaccattttgctgtgccagggcgcggcattccgtaaccagcgcagcttccggccagcacgcttgtggcgcgaccagacgcaaatccagaccggtaagcgccgcagcttcgagcatgctattgcccatgttgttacgcgcgtcacctgcatagaccagcgtcatttcgttgaacgctttgccgggcaaatgctcctgcatggtgagaagatccgccagcagctgcgtgggatggaactcattggtcaggccattccataccggcacgctagcgtattccgccagtgtttcgacaatctcctgaccatagccgcgatactgaataccgtcatacatgcgaccaagcacgcgggcagtgtctttaatgctctctttatgaccaatctggctgccgcttgggccgagataagtaacgcgagcaccctggtcatatgcggcaacttcgaaagagcatcgggtacgagtgctgtctttttcgaagatgagcgcgatgtttttaccagtgagtttggcttcttctttaccgcttttcttatcggctttcagcttcgcggctaactgcagcaggctgttgagttcagctggcgtgaaatcgagtaatttcaggaaatgcttatgataaaacccggacatagatccctcctgtggctaacgcctcaatgaattaaaattcaatttatatggatgattattcatttgcaagtctaaagcataaatctttgtcacaaaggtggaggcaatgtcagtggtgtgtgacaataagagtatcggcaggacattaagaggaatgagccatggcaaacccggaacaactggaagaacagcgtgaagaaacacgtttgattattgaagaattactggaagatggcagcgatccggacgcgctgtacaccatcgaacaccatctttccgcagacgatctggaaaccctggaaaaagcagcagttgaagcgtttaaactcggttacgaagtgaccgatccagaagagctggaagttgaagatggtgatatcgtgatttgctgcgacatcctcagcgagtgcgcgttgaatgccgatctgatcgatgcccaggttgaacaactgatgacgctggcagagaaatttgacgttgagtacgacggatggggcacttactttgaagatcctaacggcgaagatggcgacgatgaagattttgtcgatgaagacgatgacggagttcgccactaattaagcgtagcgcatcaggcccaggtagttcctgcaacctggtgaatttgtagcccggataaggcattcatgtcacatccggcataaacaaaacgtacgttgttaatgttcgaatgcccgcgagttgaacacgcgggcatttttttagagttcgcgcaacatccgcacttcacaatcgacatggcccgtgcagccaagcgcatagtcgatatgctcaaagcccaaatgctcataaagcgcaatggcttcctttaaaaaagcggtcgtttccagatagcagcgtttgaaacccatctctcgcgcctgctccatcgccattaaggccagtttttttgccagccctttgccgcggatagccggaagaaaatacatcttttgcagttcgcaaatatcgctctcactcccggttaatggcgctatcccaccgccgccgaccacttcaccctcgtactcaacgacccaatatgcatggccaggctgactatatacttgatacagctcgtcaagattcggatcggcgacggtgtagcctttatcagcggtaagaccgtattcggcggatacctgacgaatgacgcgggcgatagcaggattatcctgcagcgtcaggcgacgcattacaggactttgcggcgcaatgttattcatagtttaacccaataaaaataaagtaattatacatttgtttaataccactctcttcttacgtacgcaagcgacttataaagtaataaagtttttgccagcctattactgataagagtattgtaacgtggcagaacattttactgtctgtatatataagttatatcaatggattttttaattcagggaatttttatggctcaagttattaatgaaatggatgttccgtcccatagctttgtttttcatggtacaggtgagagatattttcttatttgtgtggtgaatgtgttgttaacgattataacgctaggtatctatttaccatgggcattaatgaaatgtaagcgttatctttatgctaatatggaagttaacggacaacgattttcttatggaattaccggtgggaatgtttttgttagttgtcttttttttgtttttttctatttcgcaatcttaatgacagtgagtgcagatatgccgcttgttggttgtgttttgactttgttactgttggttttgcttatatttatggcagcaaaaggactgcgtcatcaggccttaatgaccagtctcaacggcgtaagatttagttttaattgctctatgaaagggttctggtgggtgacctttttcttgccgattttaatggccattgggatggggactgttttctttatcagcacaaagatgctacctgccaatagtagtagtagtgttattatatccatggttctgatggcaatagttggtattgtttccattggtatttttaatggtactttatatagtctggtaatgagttttctctggagtaataccagtttcggtatacatcgtttcaaggtgaaattagatactacgtattgtataaaatatgccattctcgcatttttagctttattgccttttctcgctgttgctggttatattatcttcgatcaaatattaaatgcgtatgatagttctgtatatgcaaatgatgacattgagaatttacagcaatttatggaaatgcaacgtaaaatgataatcgcgcagttaatctattattttgggattgctgttagcacaagttatttaacggtgtctttgcgaaaccattttatgagcaacctgagtctgaatgatgggcgtattcgttttcgcttaactttaacgtaccacggtatgctttatcgcatgtgtgcgttggtggtgatatccgggattacgggcggtctggcttatccactgctgaaaatatggatgattgactggcaggcaaaaaatacgtatttgctgggcgatttggatgaccttcctttaatcaataaagaagaacaaccagataaaggcttcttagccagtattagtcggggagttatgccttctttaccatttctgtaagagataaaaaaggccggagcatgctccggccttcgttttcatcactgtgttttgattacagcgcggcgataacagcctgctgttcaatcagtttcgctttcgcttccgcatagccttccagcttctcacgctctttcgcgatgaccgcttccggtgcgcgggcgacaaagccttcgttcgccagtttgttctcgatacggctgatttcaccttcaatcttcgccacttctttcgccagacgcgccagctcatcttctttgttgatgaggccagccatcgggatcagcagctctgcaccgtcgatgatcttcgtaacggaaaccggacctttgtcatcggcaggcagcacggtgatactttccagacgcgccagggtttgcaggaagccacggttttcatttacgcgacgttctgcatccgcgctgcaaccacgcagcagcagctccagcggtttgcccggcgcgatgttcatttctgcacggatgttacgtaccgcaacgatcgcctgtttcagccattcggtgtcggccagtgcggcttcatcaacctgagatgcatcgtactgcgggaacggctgcagcatgatggtgtcggcagtgataccgcaaagtactttcacacgctgccagatggtttcggtgatgaacggaatgatcggatgcgcgaggcgcagcagaccttccagtacagtcaccagcgtatggcgagtaccgcgcagttctgcttcggtgccaccgttcattaccggcttggtcagctcgagataccagtcacagaactggttccaggtgaactcatacagaatgcctgcggcgatatcgaagcggaagctgtccagcgcttcgcggtacgctttgatggtctggttgaactccgccagaatccagcggtccgccaggctcagcgtcatttcgccgccgttgaagccgcaatcctgaccttctgtgttcatcagcacaaagcggctggcgttccacagcttgttacagaagttacggtaaccttccagacgcttcatatcccagttgatgtcacgaccggtagacgccagcgccgccagggtgaagcgcagcgcgtcagtaccgtgcggctcaataccgttcgggaactgcttctcggtgcgcttacggattttgtccgccagctgcggctgcatcatattgccggtacgtttttccagcagttctggcaggctaataccgtcaaccatatccagtgggtcgataacgttacccttggatttggacatcttctggccttcgtcatcacgaatcaggccggtcatgtaaacggtgtggaacggcacctgcggtttgccattttcatctttgatgaagtgcatggtcatcatgatcatgcgggcaatccagaagaaaatgatgtcgaaaccagataccatcacgctggttgggtggaactgacgcagggcgtcggtattttccggccagccaagggtagagaaggtccacagcgcagaagagaaccaggtatcgagaacgtcttcgtcctgacgcaggacaacatcagcaccgaggttattttctttacgcacttcgtcttcgttgcggccaacataaacgttacccgcttcgtcataccatgccgggatacggtgaccccaccacaactgacgagagatacaccagtcctgaatatcgcgcatccaggagaagtacatgttttcgtactgcttcggtacgaactgaatgtcgccgttctcaaccgcttcaaccgccggtttcgccaggacatcggcacgcacgtaccactggtcggtcagcattggttcgataactacgccgccacggtcgccgtaaggaacggtcaggtcgtgcggtttaatttcttccagcaggccaagcgcgtcaactgcggcaacgactgctttacgtgcagcaaaacgctccagtttctggaactctgcagggatttcgctggaataaacgtcagattcgttacctttggtatcgaacacctgggcgctttcacggatatcgccgtcaaaggtcaggatgttgatcatcggcagggcgtgacgtttacccacttcatagtcgttaaagtcgtgcgccggagtgattttcacgcagccggtgcctttttccatgtcggcgtgttcgtcgccaacgatcggaatacgacggttaaccagcggcagaatgacatatttgccaatcagatctttgtaacgcggatcttccgggttaacggctacgccagtatcgcccagcagggtttctggacgggtagtcgcgaccaccagataatctttaccgtctgcggttttcgcaccgtcagccagcggatagcggatgtgccacatgctacctttgctttcgcggttttcgacttccaggtcagagatagcggtgcgcagtttcggatcccagtttaccaggcgtttgccacggtaaatcaggtcttctttatacagacgaacgaaaacttctttcaccgcattggacaggccttcgtccatggtgaagcgttcacgctcccagtcgacggagttgccgagacggcgcatctgacgggtaatggtgccgccagattccgctttccattcccagattttgtcgatgaaagcttcgcggccgtagtcgtgacgggttttaccttcttctgcggcaatcttgcgctcaacgaccatctgggtagcgatcccggcgtggtcagtaccgacctgccacagggtgtttttgccctgcatgcgctgatagcggatcatggtatccatgatggtttgctggaaggcgtgacccatatgcaaactgccggtgacgttcggcggcgggatcatgatgcagaaactttcctggctttcatcgccattaggcttaaagtagccctgcttttcccagtgctcgtaaagcggctgttcgatatcttgtgggttatatgtcttttccattatttccaggttgccgtattcaggttgaaaccagccacgcggtaggctttatagcgttcgcgcgccagttgtttcagagaatcttcataaggaacgaagtctaccacttctgtgaaagcggtggcaaaatctgcaaagcttgttcgcagactaatcaatatatcgcgccggctgctgctacgcttttgcggccaggcgatctccaccggtgcaccgccgcgcggtccttctcccgctaaattatgcggaacaaagctttctgccggacgcgcccacagggcttcatccagccggtaagcctgcttttcatcttcacaggcgatgagcacgcgcttaccgctgcgccaacgttctgcggcaatttcacacaccagttgctcaacggcgcttaagccatcgacggtggtgtcattgtccagaaggtagaacgtcgcgtttttcataaatggggcttcttgtggtggatttaaatacgcatcaggtatacaccgcagcgcctgatgcgacgctgttgtgtcttatcaggcctacgagttcagtgctgtgtaggtcggataaggcgttcacgccgcatccggcaataacagccttgcctgacgcaattactcttcgccgttaaacccagcgcggtttaacaggaactgtgccagcaacgctaccggacgaccggtggcgccttttgctttaccagaacgccaggcggtaccggcgatatccaggtgcgcccagttgtacttacgggtaaagcgactcaggaagcaacctgcggtaatcgccccaccaggacgaccgccaatgttcgccatatcggcaaaattggactccagttgttcctgatactcgtcacccagcggtaagcgccatgcgcggtcaccggattgttcagacgcggcaatcagttcatgggccagcggattatggttcgccatcagaccagtaatatgatgacccagcgcgatcacgcaggcaccggtcagcgtcgccacgtcaatcaccgcttccggctcaaaacgctcaacgtaagttaacacgtcgcacagtaccaggcggccttcagcgtcggtgttcagcacttcaacggtttgaccggacatggtggttaacacatcgcccggacgataggctcgtccgccaggcatgttttcgcagcctgccaacacgccgataacgttaatcggcagttgtagctccgcgaccatccgcatcacgccgtaaaccgctgccgcaccgcacatatcgtacttcatctcatccatgccttcactaggcttgatgctgataccgccggagtcgaaggttaaacctttacccaccagcacgattgggcgtgcatcttcgctcgcgttgcctttgtactcaatcacgctcatcaggctttcgttttggctaccctgaccgaccgccagataggaatgcatccccagctctttcatctgctgttcgccgataacgcgggtgatgacattcttgctgtagctgtcagccagctggcgcgcttgactagcgaggtaagcggcgttacagatattcggcggcatattgccgagatcttttgctgctttaatcccggcggcaatcgccagaccgtgctggatcgcgcgctcaccgctggtcagttcacggcgggtcggcacgttgaacaccatcttacgcagcggacgacgcggttcgctcttgttcgttttcagctgatcgaaactgtagagcgtctcttttgccgtctcgacagcctgacgcactttccagtagttgttacggcctttaacgtgcagctcagtcagaaagcagaccgcttccatactgccagtatcattcagcgtattaatggttttctgaataacctgcttgtactgacgctcatccagctcacgttctttgccgcaaccaataaggagaattcgctcggaaagtacattcggaacatggtgcagcaacaatgtctgccccggttttccttccagttcgccccgacgtagcagggcgctgatgtacccatcgctgattttatcgagctgttctgcaatcggagaaaggcgacgtggttcgaagacgcccacgacgatgcaggaactccgctgtttctccgggctaccgctttttacactaaactccatgcactacgctcctgaatcttaaagacaacggcggtggctacagatagaattgcaagctttcgtaactcatgtccgctgttgcgatgacttcgtgttaatcttaacgttattacggcattggcacgtcagaacaaaatctgagaggtgaatccgttgagtataattatcttagcgacgatttcgacgactcaagagaataaatgacgtttaagccatgaaacaagctaaaatcctgcaaaagacgagtttttacgggcgtatttaaagtgataatcataagatatctggtgcgggagacgctcaaaagccagctggcgatactcttcatcttgcttttgatcttcttctgtcaaaagttagtgaggatcctcggcgcagcggttgacggcgatattccggcgaatctggtgctctcccttctcgggttgggcgtgccggaaatggcgcagcttatcctgccattaagcctgttcctcgggctgctgatgacgctgggcaaactgtataccgaaagtgaaattacggtaatgcatgcctgcggcctgagcaaagcggttctggtgaaagcggcaatgatccttgcggtattcacggcaatcgtagcggcggttaacgtgatgtgggcgggaccgtggagtagccgtcatcaggatgaagtgttagcagaagcgaaagcgaaccctggcatggcggcgctggcgcaagggcaattccagcaagcgactaatggcagcagcgtgctgttcatcgaaagcgttgacggcagcgatttcaaagatgtgttcctcgcgcaaattcgaccaaaaggtaatgcacgtccttctgtggtggtggccgattccggacatttaacccagctgcgcgacggctcccaggtcgtcactctcaaccagggaacgcgcttcgaaggcactgcattgttacgtgatttccgcattacggacttccaggattatcaggcgatcattggtcaccaggcggtggcgctcgacccgaacgataccgaccagatggacatgcgcacattgtggaacactgacaccgatcgtgctcgcgcagaactgaactggcgtatcacgttggtattcaccgtgtttatgatggcacttatggtcgtaccgctgagcgtggttaacccacgtcagggacgcgtactgagcatgctgccagccatgctgctgtatctacttttcttcctgatccagacctccctgaaaagcaacggcggtaaaggtaagctggacccgacgctgtggatgtggaccgttaacctgatttatctggctttagcgattgttctcaacctttgggacaccgtgccggtccgccgcctgcgcgccagttttagccgtaaaggagcggtgtgatgcaaccttttggcgtacttgaccgctatatcggtaaaactattttcaccaccatcatgatgacactgttcatgctggtgagcctgagcggcattatcaagtttgtcgatcagctgaaaaaagccgggcaggggagttacgacgcgttaggcgcaggaatgtataccttgctgagcgtgccgaaagatgtgcagatcttcttcccgatggcggctctgcttggggcgttgcttggtcttgggatgctggcgcagcgcagcgaactggtggtgatgcaggcttctggttttacccgtatgcaggtggcgctgagcgtgatgaaaaccgccattccgctggtcttgctgacgatggcgattggcgaatgggtcgcgccgcagggcgagcagatggcgcgtaactaccgtgcgcaggcgatgtacggcggcagcttgctctctacccagcaaggcttatgggcgaaagatggcaacaacttcgtctacattgagcgggttaaaggtgacgaagagttaggtggcatcagcatttatgcctttaacgagaatcgtcgtctgcaatccgtacgctatgccgctactgcgaagtttgacccggaacataaagtctggcgtctgagccaggttgatgaatctgatctgaccaatccgaaacagattaccggtagccagacggtgagcggcacctggaaaaccaacctcacgccggacaaactgggcgtggtggcgctggacccggatgcactctctatcagcggtttgcacaactatgtgaagtatctgaagagcagcggtcaggatgccggacgttatcagctcaacatgtggagcaaaatcttccagccgctatctgtggcggtgatgatgctgatggcgctgagcttcatctttggcccactgcgtagcgtaccgatgggcgtgcgtgtggtcaccggtatcagtttcggttttgtcttctacgtactggaccagatcttcggcccgctgacgttggtttatggcatcccgccgatcatcggcgcactgttgccaagcgccagcttcttcttaatcagcctgtggctgttaatgagaaaaagctaaccgaatgaacgaataaagggagcgaaagctccctttattattgttagcaaagtgtgcttcgttcattcctgaaaaataattaaaattcaatatattgcagtggggtgggcatgataagacgcgccagcgtcgcatcaggcaaagacaaatctcgcctgacttaccttcttctcccccccagcaaactccccaacatcccgcgtacaatctgattcgtcacttggcgagcggcgcttttggccattgtttgcaccacaccatctttcttcccgccgcgtggtccggtagtgccgaacaaaatatccttcaatccaccaagaatgccgtcatccaccgctacctctttccctttcgcgggaggattattttgctgctcggtactggcctgaaagcctttttgcaacatctcataggcggattcccggtccacctcatcctcatatttgccatacaccggagagtgattaatcaagccattacgctcatcttccgtcaccggccccatccggctacaaggcgcgatcaccatcgcacgctccaccacagaagggcttcctttcgcatccagaaaagagatcaacgcctcgccggtgcccagttcctgaatcgccttttcggtatcaaacgccggattggcccgcatggtttgcgccgctgccttcactgctttctgatcttttggcgtaaaagcccgcaaagcatgttgaacgcgattaccgagctgcccgagcacattatccggaatatcagacgggttttggctaacgaaccagacgcccacgcctttactgcgaataagccttatcacctgctcaatcttatccagcagtacctgcggggcatcgttaaacagcagatgtgcctcgtcgaagaaaaacaccagttttggtttctccagatcgcccgcttccggcaattgttcatacaactcactaagcatccacagcaggctggcggcgtacagtttcggcatctgataaagtttctcggcgctgaggatattgataacgcctttaccgttggcatcggtgcgcatccagtctttgatatccagcatcggctcaccaaagaagtgtgctgcgccttgctgttccaggctcaacagcccgcgctggatggcaccaacgcttgcgctactgatattaccgtactgattctggaaggatttggcgttatcgccgatgtactgggtaattgcccgcagatctttaaagtcgagcagtaacagcccctgatcgtcagcaatgcggaagatgatattcagcacgccagattgcacatcgttgagattcaacagtcgtgccagcaacagcggccccagatcgctaaccgtcgcccgcaccggatggcctttctcgccaaagatatcccacaccaccaccggattggcatgcggttgccagtcattgacgccgatatttttaagccttgcgagcagtttttcgctcaccgttcctgcctgcgcgacgccggtcagatcgcctttcacatcagccataaacaccggcacgccgatttcgctcaaactctccgccagtttttgcagcgtaacggttttacccgtccccgttgcgccggtaatcagcccatgacggttagccattcccggcagtaaaaacagttctgtgtccggcgtgcgggcaattaacaggggttcactcatgagatatcctccagtttcctgcctggagtataggcaacgtccggcaaagagaatacgtgtaatgaagagaaaataacttaaagcgtgttgccgtgataaatctgatacccgaggtcaacagtgttgtggttgtgatcgttatttttaattttgctcagcaacatttgggcggccatccgaccaatatcaaaacggggagtaattacgctggcgaggcttgggatcatttgcctgccaatctccagcccatgaaaacccgcaatggaaatttgttctggcacggcgaggtttcgctcgcggcacagcagaagcgcacccatcgcaatatcgtcattggtgcaaaatacaccgtctaaatccgggtttgcgctaagggcatcacgcattaactgcattcctaaatgaatggaactgatggcgcgtggattcatgcgtaatggggaaagattatgcagcatcatcgcatcgcaatacccctgataacgctgttcatcgcgggtgtcatctttggaaccgagatacagaattttgtgcctgactcgcttctccagcatggtacacaccatgtcaaaagcggcctgccgattatcaaaaccgacctccatatccagccgttctccctgtacatccatcaattccacgaccggaatggtggcactacgcagaaatttcaccgtcctgatggtgtgatatttttcgctaagtataatcccgtcaatgttataagagagcaggttaatcacgctctcttcttcggaatcgcgatcgtaattgtaattagcaataagggtctgataattatgctcagaggtgacggattctattcccgcgagaatgtcagcgaagagttgattttgaaaactcggaatcaagataccgagggtataactttgtgcattcaacaacatgccgggagcgcgattagggatataattgatctcttccataattttggcgatgcgctcgcctgtttcctttgccacctttttcgggctgcggatataacgactcacggtcatttttgttacgccagccagcgtagcgatatcctgtaaagaaattctgtgattgcgcataacttctcccaacgtcgggggaatcttcaatcttcccccgaaactacatcacaatattttattctttcagtgcaatacggcgttaatggctaacacgcccagcaaacccataatagaaataagggtttccatcaccgtccaggtacgcaacgtttcaccaaccgtcagattaaaataccctttaaatagccagaagccagggtcgtttacgtgactcgcgatcacgctgcccgcaccggttgccagtaccattaaagcgggatcggcatgggtaacgttgataatcggcaacaccacacccgcggtggtaatggccgcgacggtggcagagcccagagcgatacgcaacagcgccgcaacagtccagcacatcaataacgggctaagtgtagttccggtcattaagtgactaatatagtgcccgacaccgctatctactaatacctgcttaaacgcgccgccgccagcgataataaacacaatcatcgcgatagcgcctatagaatccccaatgatatccatgatttgctcgatggtgcgtccattacgtcggcccagtgtgaaaatcgcaataacaatggcaataaacagcgcaacggcagggttaccgacaaattcaaagaagaggcgcacggtgttagttttcggtaacgtaatttcacaaacggcggcgatagccatcaggatgaccgggatcacggcagcgaaaatactgttccagaaggagggcatctcctcttcgctaaacagatgaggattaaataagccttccggtggtgctttctcaaagcgagttagcagtttagaaaacagcggtcctgcgacaataactgtcggaatggtaatgataaatccatacagtaaagtcgttccgagattagcctcaaagatagtcgcgatggcagtaggccctggatgtggcggcagaaaacagtgggttacagagagcgctgctaccattggtacgccaacatacaacaggggtaatccactacttgctacgatggtaaataccaacggcaacagcaggacaaaacccacttcaaaaaacatggcgaggcccacaaccagaccggtgatcactagcgcccattgcacgcgttttttaccaaaagtagcaatcagcgtagtggcgatacgttgtgccgcacccgtatcagaaatcagcttgcctaacatggccccgaaaccgaggatcattgccagcccgccgagcgtgctgccgataccattttgtatagagtgcaggacggcctgtgcatccatcccttcggcaaatccgacgacggcagctaccagaacgagggcaataaagccgttaactttaaagccgatcatcaggataagaagcagcgcgacgcctgccgcaataatgattaatggcatagtctttatctcttattagtgccagaaaagcagcgctttcgcgctgcacgtaggggggctgttaaacagccactaacatgccgccatcaacaaacaacaggtggccgtttacgaaatcagaggctttactagaaaggaacaccgcagcaccaatcagttcctgcggatctccccagcgtgcggcgggggtccgtttgcacaaccaggcggtgaaggcttcgtcctcaaccagtgctttagtcatttctgttttgaaatagcccggcgcaataccgttgacctgaatattgtggcgcgccagctcgacgcacatgccgcgggtgagcatttttaccgcccctttgcttgcggcataaggggtgatggtgtcacgtcccagttcgctttgcatgctgcaaatattaataactttacctgccttgcgttcaaccatgtgacgagttaccgcttggcttaccaggaacacggcggtctggtttactgcgatcacatcattccactcttgttcagggaactcagtaaaaggatgacggcgctggataccggcgttattcaccagcacatcaatggggccgatgtccttttcgatatgttcaacggcggcatcaatttcatgtttatgagtaacattaaaaggtgcggcaacggcctgaataccctcctggtggagtttttctacagcaagttctgcgcgttcggcagtaatatcattaataattatttgtgcgccatatttacccaggccggttgccagtaaaaagccaatgccctgtgcactaccggtaatcaagatattttttcctgccagactaaatagatcgttcattgtattattcctttatttatctcttagaaaacaagctggacttttgctgcctgggttttatcaccggcgaaacgtagcgcctcttccaggtcagtgaagggatattcagcactcagtaaaggcagtggattgataacgccattcgccagccaactcactgcggtattaaattcgctggtaaaacggaaagagcctctgagactaatctccttaccaatcaacgtcatcattgggaattctgccatcgcgcctcccatacctacctgcaccattacgccgcgtgcacgagtgacctccagacaggtattcacactactaggatgaccggacacttcaaagctgacatcgaaatagcctttttccgctttccagtgatccatgtcgtcgttttgtgggtttacgagcacatccgcccccatctctttgcccaggctaagggaacggggactcacatcagcacagacaatttccgcggcccccagtgttttcactgcactgacaatcaggcagccaatgggtccaacaccggaaataaatactcgcttgccctgtaactcgccggcctgatgtgcggcatgaatcgcgacggctaaaggttcggcaaaagccataaccttttcgtcagctttggccggataagggacacattggctcgtttcgaccattttataacgggtaaaaccaccatcaacatgagggaaatacatggcactgccaaaaaaacgcatatctgtacactgattctcgttatgttcaatgcagtatttgcagtgaccgcacggtttagacggattaatggctaccgtttgcccttcatgtaattcactactgtcgctatgaataactttaccgataacttcatgacctaacaccatcggtgcctttatcatgaaattacctacttttccttcctgataataatgtaaatcggaaccgcaaattccacctcgggttatttgtactaatgttccattattattccaatctatcgtctgctcggtaacggcaacagttttcttgcccgcaacaacgcaggactgtgttttcacttgcataaattcctcactggtcaggtagacacctcggaagcatttaagcggttttaactgtcattatttgtgatgaagatcacgtcagaaaattgttacattactatgttacgcataacgtgatgtgccttgtaattcttatcagtagaaataaaaaaacgtgaaattattatgccgccaggcgtagtatcgcagcaggtaagatgattcaggagattttaaatggcgggtgaaagctttattttgatgggcgttagtgggagtggtaaaacattaattggtagcaaggttgccgcgttattatctgctaaatttattgatggtgacgatcttcatccagccaaaaatatagataaaatgagccagggtattccattatctgatgaagatcgacttccctggctggaacgcttaaatgatgctagttacagtctttataaaaagaatgaaacaggatttattgtctgtagtagtttaaaaaaacagtatcgtgatattttacgcaagggtagcccccatgttcatttcctctggttagatggcgactatgaaactattctcgcgcgaatgcagcgtcgggctgggcattttatgccggtagcgttactaaaaagtcagtttgaggcactggagcgtccacaagcagatgaacaggatattgtgcgcattgatatcaaccatgatattgccaatgtcaccgaacaatgtcggcaggctgtgctggcgatacgacaaaacagaatatgtgcgaaagagggcagcgccagtgatcagcgctgcgaatgattttcaaaaatcggctttcaacaccacgcggtaacgcgccttaccgtcgcgcacatgctggatggcgtcgttaattttgctcatcgggaacagttcggtggtcggcgcaaccttgctgcgggcggcaaaacgcatcagcttacgcagctcataaggcgtgccggtagcagaaccagagacgctgcgatcgcccgcaattaacgtaaaggccggaacagacagcggcgtgagaaccgcaccgaccgtatggaaattaccgccataggtcagcgcctcaaaatagggctgccagtcgaggctgacgttgacggtgttgataatgagatcaaactgccccgccagtgctttcagtgcctgcggatcgcggctattcaccactttatcggcacccatcgccagcacttcctgctctttcgccggattagaactaaaggctgtcacctcgcatcccattgcgtgcagaagttttatagcgatatgccccagcccgccaataccaattaccccaacgcggctggtagcagtgatatggtgcatcaacagtggtttaaagaccgtgataccgccgcacaacagcggcccggcggactcgatatcaatattttctggcagtggaatcacccattgccagtccgcacgcaacttctcggcaaagccaccgcgattcataatcgtcggcaccgcaccttgctcgcagttgatctgattaccgctaatacaggcgtcgcagtgaccacagctacgcgccgtccagccaatcccgacacgctgaccgacctgcaaacctttatcctgcgcggcgctcccgagtgccaccacgcgcccaatcacctcatgcccggcaaccagcggatattgactaaatccccattcgttatcgatcatgctcagatcggaatggcagatcccgcagtaatccacctgcacttcaacatcttgtggcctcagctcaccgggatcgtactcataaacttccagttcgccgcccgcttcttttgcggcatagctttttatcatgctcattttttggtccttctctggtgttgtttgggaagtgtagagcatggcagggcggggtgcctggagtgtgacaaaggttacacatcgctgtatgcaatgctgaaaatttcagcacttagcgaggtgcgagcaagctggcgcttgcatggtggcgtgcgacaggtataatccacaacgttttccgcatacctcttcagtgccgaagtggcgaaatcggtagacgcagttgattcaaaatcaaccgtagaaatacgtgccggttcgagtccggccttcggcaccaaaagtatgtaaatagacctcaactgaggtctttttttatgcctgaaatccagtgtttatctatctttcccgctatattaactctctcaaggtcaaccgatatcaacgtacatctaccaacatatgttggtacagatgatggtatttccggttcgataatgcttgtaccaacagggagggaatacgagaaatcacaggacattgctaatgctggtacgcaatattacctgaagctaaaaacctgcacgttagccctttgtaggccagataagacgcgtcagcgtcgcatctggcataaacaaagcgcactttgctggtctgttcccctcaccctaaccctctccccggaggggcgaggggactgtccgggcacatttttagactttgtcatcagtctgagcctgccattggcaggctctggtgtccttttacgctaccatgctaataatcagcacaataatcagcccaaccacggagttgaccagctccagcagaccccaggttttcaacgtgtcttttacactcaggtcaaagtaacctttgaacaaccagaaagatgcatcgttaatgtgggtgagggtgttggaacccgcagccgtcgccagtaccagcagcgccggattcacgccaaccagctgaccagttgctggatctaggattgcagcactgataatcccggcggcggtcatcgcgctaacgacaccctgacccgtcgccagacgaattagcacagtgatcagccatgccatgatgtaggggctgatattgccgtgggacatcaacatgccgatggtgtcgccaatgccggtgtcgatgatggtctgcttcagcacgccacccgcaccgatgatcagaatcaccattgcaatactcttcaccgcgctttcaaaagcgttcatcacccactgcatgtcatgaccacgtgcggtgccaaagagtacgaatgcaaccaccatcgcaataaacattgcaatcgggctggaaccgataaagttaaccacttcccaggcaggggtatcttttaccagccagatattggcgatggtggtagagatcataatgatcgccgggatcagcggcaccagaatgctaacgccgaaagagggcagattattcatatctaccggttgatctgctttcaggaaacttggcgttgggcgctcaagattgccgaggaacttcggcaggatcagacctgcgcagattacacttgggatcgtcaccagtacgccatagatataaaccatccccatatccgcgccataagcattcaccagcgccaccggacccggctgcggtgggaacagactatgtgcggtagtggcagctgctactgccgggatcgccagtttcaggaacggaattttagcttcggcggcaataacaataaccagcggcgctaacatgataaaggccacttcatagaacatcgccagaccaaaaatcaggccgatgataatcacgctcagctgtacatagcgcagaccgagacgcgccagcagcgtatgcgctatctggtgagccgcgccggagtcgaccatcaatttaccgatgaccgcaccgaacaccacgatgatagccagttcccccagcgtgttgccgaagcccgctttcatagtgtgcagcaggctcatcaaatccatgcccgccagcatcccgacggacagcgccgccaccaacaaagccaccatactattgattttgaacttcaaattcagtaccagcatcagaccaatgccgaataccacccagagaatgttaagcacatgcataacgttttaccttacctggttgaaccgttgttattttgggcgatatgttatgtaaattggtcaaccattgttgcgatgaatgtcacatcctctgatcaataaccatcgattaccctttgctgcaatttgcagcaacaaccatgagagtgaaattcttgtgatgtggttaaccaatttcagaattcgggttgacatgtcttaccaaaaggtagaacttatacgccatctcatccgatgcaacgccacggctgcggtctggttgttcatccggatacctaaacaactccagggttccgcgtctctttgctgtggaacccactatgtgaaagaggaaaaatcatggaacagacctggcgctggtacggcccaaacgatccggtttctttagctgatgtccgtcaggcgggcgcaactggcgtggttaccgcgctgcaccatatcccgaacggcgaagtatggtccgttgaagagatcctcaaacgcaaggcgatcattgaagacgcaggcctggtgtggtctgtcgtagaaagcgtgccaattcacgaagatatcaaaacccacactggcaactatgagcagtggatcgctaactatcagcagactctgcgcaacctggcgcagtgtggcattcgcaccgtgtgctacaacttcatgccggtgctcgactggacccgtactgacctcgaatacgtgctgccagacggctccaaagctctgcgcttcgaccagatcgaattcgctgcattcgaaatgcatatcctgaaacgcccaggcgcggaagcggattacaccgaagaagaaattgctcaggcagctgaacgcttcgccactatgagcgatgaagacaaagcgcgtctgacccgtaacatcattgctggtcttccgggcgcggaagaaggctacaccctcgaccagttccgtaaacacctggagctgtacaaagatatcgacaaagcgaagctgcgcgaaaactttgccgtcttcctgaaagcgattattccagttgctgaagaagtcggcgtgcgtatggctgttcacccggacgatccgccgcgcccgatcctcggcctgccgcgcattgtttccaccattgaagatatgcagtggatggttgataccgtaaacagcatggcaaacggttttaccatgtgcaccggttcctacggcgtgcgtgctgacaacgatctggttgatatgatcaagcagttcggtccgcgtatttacttcacccatctgcgctccaccatgcgtgaagataacccgaaaaccttccacgaagcggcgcacctgaacggtgacgttgatatgtacgaagtggtgaaagcgattgttgaagaagaacaccgtcgtaaagcggaaggcaaagaagacctgatcccgatgcgtccggaccacggtcatcagatgctggacgacctgaagaagaaaaccaacccaggttactccgcaattggtcgtctgaaaggcctggccgaagttcgcggtgtcgaactggcgatccagcgcgctttctttagccgttaatatccaccggcatggctgcgcgccgtgccggttccttcttccttgccgtcactctttgaagacggattctggagtttacgatgactactattgttgacagcaatctgccggttgcccgcccgagttgggatcattctcgtctggaaagtcgcattgtgcatctcggttgcggggcgtttcaccgcgcgcaccaggcgctgtatacccatcatctgctggaaagcaccgacagcgactggggcatctgcgaagttaacctgatgccaggcaacgaccgcgtgctgatcgaaaacctgaaaaaacagcaactgctgtacaccgtagcggaaaaaggcgcagagagcaccgagctgaaaattatcggtagcatgaaagaagcgctgcatccggaaatcgatggctgcgaaggtattctcaacgcgatggcgcgtccgcaaacggcgattgtctctctaacggtcacggaaaaaggctactgcgctgatgcggcaagcggtcaactggatctcaataacccgctgatcaagcacgatctggaaaacccgactgcgccgaagtccgcgattggttacatcgtcgaagcgttgcgtctgcgtcgtgaaaaagggttgaaagcgtttacggtgatgtcctgcgataacgtgcgtgaaaacggtcatgtggcgaaggtcgcggtactggggctggctcaggcgcgtgacccgcagctggcggcatggattgaagaaaatgtcaccttcccgtgcaccatggttgaccgcatcgttccggcggcgacgccagaaaccttacaggaaattgctgaccagctgggtgtttacgacccgtgcgccattgcctgcgaaccgttccgtcagtgggtgattgaagataacttcgttaatggtcgcccggattgggataaagtgggcgcacagttcgttgcagacgttgtgccgttcgaaatgatgaagctgcgtatgctgaacggcagccactcttttctggcgtacctcggttacctcggcggctatgaaaccattgccgacaccgtgactaacccggcttatcgcaaagcggcctttgccctgatgatgcaggaacaagcgccaacgctgagcatgccggaaggtacagacctgaacgcctatgcgacgctgctgatcgagcgtttcagcaacccgtctctgcgtcaccgtacctggcagattgcgatggacggcagccagaagttaccgcagcgtctgctggacccggtgcgtctgcacctgcaaaacggcggcagctggcgtcacctggcgctgggcgtggctggctggatgcgttacacccagggcgtggatgagcagggtaatgccattgacgtggtcgacccgatgctggcggagttccagaagatcaacgcgcagtatcagggcgcagaccgcgtgaaagcgctgctgggcctgagcggtatttttgccgatgatctgccgcagaatgccgactttgttggcgcagtgacggcggcatatcagcagctgtgcgaacgcggtgcgcgcgagtgtgtggctgcgctgtaactaactgattaccctacagacttactggtcaatcaaactgatatttggttgaccagttttcgtttttttgcccacctgtacgtgccaacttccagtgctaatggtatagtttgagattaacgggggccgtaaaattgcccgttgtaggccggataaggcgttcacgccgcatccggcaaaaatttgattaaccgcacctaacggacacaacaccatgaaatctgccacctctgcgcaaagaccttaccaggaagtcggggcgatgatccgcgatctgatcataaagacgccgtacaatcctggcgaacggctgccgccggagcgtgaaattgcagaaatgcttgatgtcacgcggacggtggtacgtgaagcgctgatcatgctggagatcaaagggctggtggaagtacgccggggtgccggtatctatgttcttgataacagtggcagccagaacacagacagtccggatgccaacgtctgcaacgatgccggtccttttgagctgttacaggcgcggcagttattggagagcaacatcgccgagtttgccgctttgcaggctacccgcgaagatatcgtcaaaatgcgtcaggcattgcaactggaagagcgtgaactggcttccagtgcgccgggcagcagcgaaagcggtgacatgcagttccatctcgctattgccgaagcaacgcataacagcatgctggtggagctgttccgtcagtcctggcagtggcgggaaaacaatccaatgtggatccagttgcacagccatctggatgacagcctgtatcgcaaagagtggttgggcgatcacaaacagatcctcgccgcgttaatcaaaaaagatgcccgagcggcgaagctggcaatgtggcagcatctggaaaacgttaagcaacgtctgctggaattcagcaacgttgacgatatttattttgatggctatctgtttgatagttggccgctggataaagtcgacgcctgacttattataataagcgcaagggtaaacgttccttgcgctttcttaaattaagaagtcgcaatgagtattactttgtaaattgcagggtattgtttagctatctgtataacctgaatgttagtactcattcttcctggtagtaaggcgagattattaaagttgccatgcagcgtccggggaagtgttgggcgctgttttttttgtttcttaataatgtgttgtaagccgtagaaggcgtgtaggtcgcaccctatgcgacctacacatcagtcaggaattacccttcacgttctaccactttaatttccaccatgccgatcccgagcttacgcgggctgtgtccgaggatattcccttcgttggtactgacaggttccggcggcacaattaccagtgtgtcggcatcggttgggttatcgaaatgcagtgtggtggtggtcacttcattgcccagcacaagagtttgttcttcattgcctacgcgtaccggaataggacggctggcgttattgccgtatgctttggcggtaatcaccaggtcaaatttcttcggcagcggatgcttgtactcgatttttacttcatcgcccagctgcgcgttggaccagcggccccagctctccggacgggaaatcccgctaaactgtttcacctcttctggcgcaccggcgacgttaaagatgaaactgtcggctttgtagcgaatatcgttatcaacaatcttcagcgtatcgacattgcctttgtaacgcgccatgtcgatgaccgtatctttaaatgccgttttgccctgccatgttgttttgtcaacatgctgaacaatttgctgaccgccaagctgcccttggctgacacaccagtcggtggaaagtgccagttccggagcccagagttgtgccatcttgtagcaacggtcaacccagacgaaattgtcgcgtggagcgaaatcggccagctggaaacgcagcggtgcactgtattcgctttccggcagcggttccacgcgtttgtcactaacccgcaacagcagcggcaaacggaaatggctaccgctgaaggcaatcatgtttttctgctggtcgatggtgaactctttcatctctttagggaatttccacaggcggatgatatctggcttccacgccaatgttttctctttgatattgaggaagatttcgctcatgctctgcccggataaactgctacgaccaagtccgagatagttatcgccaccgagaatgtccagcaccgtcgcgccgttatccatcgtgttacgcttcactgccagcgtctcttgctgcggcttgtcgccacgaatgacaaaaaacaggttattgcgatcctgcttattgaggtatttccacgccgtgttgttcatcgctaaatggtcagaagagacgacgatgacggtatctttaaaccacggactcgctttgattttgttgataaacgtcgcgatgttctcctggctgcaacttaccgcgctgaaactctgattcggtttaccgtcaaaatcatattttttgcggttacaggtacgagagataaaaccatccgggtgatgggtatcgactgtcagggtaaacagactgaatcgctgaccactgcgggaaagctcttcaaactttttccacgcttcatcgagaacggtatcgtcgtagaatccccagtcgttgcgatagtgcgggtcggctaccacgcttttcagctcttcactgccgtataagtggtcgaagccatggctcttcaggaacacatctttaccggcaaaacgcagattcgcgccctgcacgaaatagttctgataaccgctgtttttcaggatatctcccagacagatgttctgcgggaagaagctggagacagaggcggaggcgttgccttcaaagggggcaaacagcggtatgccgcactgagaagccaccatgcccgcaatcgtgtaatctgttcccggcagctgctgcgtgtggctgaaatccaggccttcatttttcaacgcgcccagttcaggcgtgagatccgggaaagcctcgttatcaaaataggtccgctcgagactttcgccgtagatataaaccaggttgagtttcgggtcagggatagttttgctcggctctttataataagccgcaaagtccgggtcgccgtcgcgactctgggatttcaccagttccgttatctgacgaaatgccgggctggcgtccacgctacccagcgccagtaagagcgccagcaggctgtaaccaaaatggtgcggatgatggcgacgacggcgcaggatccagcccagcgcaccgaacaccgctgtcagccccagcacaatgccgatacccggcaaaatgtatttgctgacgccagcaccggtcaggctgttggttaaggtatagagaaccgcgtcgttaataccatcgccagtaaaatagtcgctggcaaacagggtgatatttaaaacgacaaatagccccagcaccgttaacgtggctgcaaaccaccaggtgttacgtcccgctttccatgcgtaaatcagcacagaggcgagaaaaagggcgaaagagagtagttcactcaacgggcgatcctcactaaaccgggccgtttagccaacgtttaagctttttgagaagcacaatgtaatggcgtcgccatattgctgcaattctagtgtcaaaaaaatgcgatgttgttaggaattagtttataaacagacttttttgattacggtcacttcccgtgtaacaggggtaaaaccgtccaggagcagggaaaagggcaggagagagccgcgtcagccgggtaacagctaaaacgcggcgtttcgcggttcaggaaatgaagttcagcccctgttttaacaccagatcgcaggctttggttttcaccttttctgccagcggagttgttccgatgttatccagattgagttgctgaccatctttggttttcagcaaaccctgaatgccgtccagatagttggtgtcttctttttgctcttcactgttcaggcccagcttttccagcacctggttcttgatgttttcggcatcggttacgctcgccagcttttgcttcgcgcagtattgcagaatgcctgcggcattgttcatgttatctgcgcttaaggcctggtttccgctgctaagcaagttagttaaactcgcgaggctccaaccgccttcctgtgtcgtgctgttttggttgccaagttcgctggcggcgctggagagcgcatctttccaggacgcagcatgcaccccggtggaaattaatgcgctggcggcaatggcacagcacagaagatgtttaacagttttcatcatcattactcaaggtggaattgtgtcgcagtataccgccagaaacggggattaatactctttacctgttacccggctacggtagctatcccagttgaagatcacccacaaactgttacccaggcgcatacggtccatcacgcgttcgcccagcaacttggtcatctcttccatattactgttggtcagcatcccggttgggcgtttggaagaagagcggcgatcgacgatctggttgatgatcactttttcgtatttgctttcggtctgcacgccgatctcatcgatcaccagcagatcaacgttgctcagatcgttaagcagttgttcttcgctggtaccgctattcctgaaggtatctttcatcgcgctcataatatcggccacggtgatgatcaatacggatttaccgcgtagcagcagctcgttgcagattgccgccgccagatggtttttgccggttcctggcttaccagaaaagatgaagctggcgatgttgccgtcaaactcttcgacatactggcgcgctttgcttaacgcattcatctgcccttcacactcaacgcgatagttctcaaaggaacagttctgatgcagtggacgaataccggagcggttaaaggtgcgctgcattttcatcgcccgattttcacgttcgagagcggcggagcggatcgctccttgttctttttgccaggccagtagttcttcacccgttttgaatgcgggtttgatatgggcaggcatcattttttgcaggcgttgcatcaggtcgccaacgtttttcatcgttaccctctgaatcctggtggaatttggctgtcaggttcgctgaccgtattcacatctcgtttcggcagtccgccgttgctggcacgaccgatttgcaggctgcgcgccagtttttgttgccactgcacatggtgaaagactttaccttccgcctgccagtaggcaatgaaactggccagttcttcggtggtcaccggctctcttagcgccacgccccatagcgccgccaggcggataaaatcggcatcgggttgccagtccggatacatggcgaatttccccatgggtacagcaacgggagcggcttgcggttcctgatagagttgatcgtccagagcgacatcgcttcccggacgcgccagcttttcttccagcgccagcagttcagccaggcgtgcaggcgtgacggcataaaacgccggggcattgttagcaaatacggcaaccacaccgccttcagcttttgccagaacggtttggtgatcgtgtaccagggcgtcaataccaacgacgtccggggtcaaaactctggaagacatactgtttctcaaatatggaacgatgaacgagaagggagataacttttatagtaacacacggaggagaggaggctgtctctcatccgtgtgcttaagcgaggcaattttatacgcgagggcgcttgcggtacaaccataatccaggaatggaaagaccgatggataacgcaccaacaatgctactagctgtaagaaagttggttaacagggtaatcatcaacggttcgctgtaacctaactggctgatttttaccgcgctaatcattgcggtataagcgcttatgcccgggaacatagggataacggccgccacggtaaacactttcggatgcgccagataccagcggctccattgaataccaatggtaccgaccagcatagaagccataaaggtactccactcaatattcaacccgctggtcatcaagatcattcgggaaccatgacctatcgagccaagcagcgcacaccagcgtaacgcccgcacgggaacgttgaacaccatcgcaaagccgaccgcaggaatggcggcgaggatcatatcctgcgccaacgctaacagaaattcgatcacacccatccgcgtagcccccaaatcgtcagtgccatcactacgccgacgcaggtagccagtgtcagcagactggcgatcgcccagcgtgccagtccggtattgatgtggcctttaaacatatcggcgacggcattaatcaacggaaagcccggcactagcagcagaacgctggcggccatcgcaatggtgggggtattgctgaaagtggggagttgcaaaagcaatccggaaatggtggtggcggcgaaagcggtaaggcaaaagttgatctgtggatgaagatgacgttgtgccagcagctggcggatatacatcgcggtcgtactggcaaagaaggtgatgacggcaccatcccagccaccgttattgagtttacagaaacaggcgcaagaaaggccaaccattaaggctaccagccatcttgggtaacgtaatggctgaatttggctaaatcgtttctctacgcctttgtaatccagcagatgatgctccgcaagaatcacaatgtgctggacttcagtcaccacatgcatattaatgccgcgatcgtgatttttacgtgtgcttgtcaggcattgcccatctttaatagttgtcagcactatggcgttgctagagatagaactttcgacgctgtccattcccagtgcccgacccagtcgactggaaagctcatcaaccaacgcgctttccgcaccatgttgcaaaagaaataatccacactggatacaaagccgtgttacggctcgctgttgctcagtttgcataactcgccctttgtcatagacgtgctgcgtattgttcagataatgagaatccatttgtatcatgaagcacggttgttttgcggtaggttaagatcaaaattgcgctgattaatcctggttatcgggagaagctcggtgataaaaagcgaattatctctcgccgcaaacaaactatcacatgaatattatcatcataatgaatttattgtttggcctttacgaatcaggataatagataaccgggcacgttttttaatgttaacaagctaaaaccatcagatttcattgaataaatattggttgtgtgattttgcattctgcgggaagggatatcatttaattataaattaaatgaatgtgatttctgtttttcattaagtattcctaacaacttaatgtagatattttaaatgtctccaggctatttcaccaggttatcatttgatgctaaccttctgacacatgcagtggagttgttgtgcagcaggagtatgctgatatgaaagtgaatgctaaggataatttattcgcttaatctattaatttgctggaaacatttaaggaatgaatatcctgaataaaccatcataatttttagacagtggatgtggaggaaatatgttgccaggatgctgcaaaaatggaattgttatcagtaaaatacctgttatgcaagcagggttaaaagaggtcatgaggactcacttccctgaatatgaaataatatccagcgcctctgcggaggaccttaccttattacaattacgtcgttccggattagtcattgctgatttagccggtgaaagtgaagatccacgttctgtttgtgaacattattattctttaatcagtcaatatcgggaaattcactgggttttcatggtgagtcgctcctggtattcccaggcagtagaactgctcatgtgccctacggcgacgttattgtctgatgttgaacccattgagaatctggtcaagaccgtacgttccggcaatacgcacgcagagcgtatcagcgccatgctgacctccccggcaatgactgaaactcatgattttagctatcgctccgtcattctcactcttagtgagcgcaaggtactgcggctattaggtaaaggatggggcatcaaccagatagctagtttgcttaagaaaagtaataaaactatcagcgcccaaaaaaacagtgcgatgcgtcgactggcaattcacagcaacgctgaaatgtatgcatggataaatagcgcgcagggtgcaagagaacttaacttgccttctgtttatggagatgccgcagaatggaacacagccgaattaagaagagaaatgagccacagttaaaaaaatgcgtcatgagtagtatcggtattgagagtttattcagaaagtttgcgggtaacccttataagctccatacctataccagtcaggagagttttcaggatgccatgagccggatcagctttgcggcggtcattttttctttttctgccatgagaagtgagcgcagagagggattatcttgcctgactgaactggcgattaagtttccgcgtacccggcgtttagttattgcggatgatgatattgaagctcggctgattggtagtttgagcccaagtccgctggacggtgtattaagtaaagcgagtacgctggagatttttcatcaggaactctttttgagtttaaatggtgtacgtcaggcgaccgaccgactgaacaatcagtggtacattaaccaaagccggacgttaagcccgacggagagagaaatattgcgctttatgagccgtggctacagtatgacacaaattgccgagcagcttaaacgcaatatcaaaacgatccgtgcacataaatttaatgtgatgagcaaactgggcgtcagttctgacgcagggttgttggaggccgcagatattctgttatgtatgcggcattgcgaaacaagtaatgtgttgcatccctattaatccgcatgatgccgggtttacttccccggcagtgctttcatttcagcgtacaatcgccacattgctgcacatccggtaagcgataacgctggcagcaagtgcggcgcaccagcaggccgtcgcgcagtaccacggtacgccagagtggattatcttcaccgttcgtgagcgttttctcaaaaaagagggcatggcgcaggctttcaacagtagcctcgccgagcagttgcttcatctcagtgagataccagttgatcaaataaccggtattactccagataagtttgccgttgatctctccggtcgcttctagtgcttgcacaaccggaaccagcgcctggctgattaacgtttccattcgatgctgcgggctatgtggtgttgcgtttttatcttcacacacatcgacccagaaacaggcgacgcgtccggtttcgtgaaactcagcatggaaatgttccgggctcacatctaatgccttttcctgcgtcagtagcgccagcattaatggtggcaccatcaggccgatataccattgtgcccatagactgatcagcggtttgttctcgcggatcatcatcggttggttgcgatagatatgatcggaatagaccgccagcagagaacttagcacattcggactactccattgcgccagcgtcatggcgttaagtggggcaggttcatccaggcggataaactccagcaaatgttcacgatgttttgcgatcgtcgcccgcacggcttgcgcaagcgtgggatcctgcggctggagatgcgttcgccagatgacatcttcatagagcggtgcggaacgataggccataatcgggatagtaatctaaatgataatgattgctaatcatagcgataggtttacccgatagcaagggatttatctggcttgcaaatgataaaaattatcatatgatattggttatcattatcaatgaaagagatgaaatcatgttgcaacgtacgctgggcagtggctggggagtgttgctgccgggattgctgattgcggggctgatgtatgcggatttaagcagtgatcagtggcggattgtcattctgatgggattagtattgacgccgatgatgctgtatcacaaacagttgcggcattacattttgctaccaagctgcctggcacttattgctggcatcatgctgatgataatgaatttgaatcagggatgaaaaatcaaggaagaaacaagaaaggaagtaaagataattggtgcgaggggggggacttgaacccccacgtccgtaaggacactaacacctgaagctagcgcgtctaccaattccgccaccttcgcacagtcatcttactttttttgatatcgcctcgtttggtgcgaggggggggacttgaacccccacgtccgtaagaacactaacacctgaagctagcgcgtctaccaattccgccaccttcgcccagtgcgagcaatatcaacgtggtttttggtgcgaggggggggacttgaacccccacgtccgtaaggacactaacacctgaagctagcgcgtctaccaattccgccaccttcgcataccatcaattcttaaaaagaattgctaccacggaggcgcattctagtggttttcagcttttcgtcaatagttaattatcgacagaggtgtaattgctggaaaaatgtccatcaggaaactagcgtgcaggtttggtatgcatgcgggggcagatgccagatgcgacgctggcgcgtcttatctggcctacgaagggctaacgtgcaggttttgtaggtcggataaggcgttcacgccgcatccgacacggtattcggcgagataattaacctttcttcgcctggcgggtcataatggcgcgatacaccttgaagcgccctgtttgcgcgatcacttcgtggaagccaaatgtctcatccagcacgtccggataaggcaggaaggcgttcgctacaattcgcagctcgccgccgctattaagatgacgcaccgcaccgcgaatcagcgtttgcgccgcatccaggctggtttgcatcccatcgtggaacggcgggttggagatgatcatatcaaaacgacctttcacctcggaaaagacgttgctggcaaagacttcaccttcaacaccgttggccgcaagtgttgcgcggctggcttctaccgccggggcagagacatcgcacaaggtgagacgaattttcgggctatggcgcgcaaaggcaacactaagcacgcccgcgccacagccgacatccagcactttacctttcgtgtgcggagttaacgtgctgagcagcaactggctaccgacatccagaccgtcgcggctaaacacgccaggcagcgttttgaccgtcaggccatcgacgctgtattcgccccagaatttctccgcatcaaataccggctgtttttccagacgaccaaaatagaggccacagcgacgagcgctgtcgactttattcaacggcgcataatctgccagcatctgctcggcgctgcgcacgccgctgcggttctcgccaacgacaaaaatatctgtccccactggcagcagagaaagtaaattcatcaactggaactgggcttccggtttgttcttcggccagtagtaaatcagcgtatcgcaatctgcgacgtcatccgccgtggcgaccagactgaaacgggcgttatcccccatctggcggcttaatacctgccagtggtggaattgctgggtatgagcacggctggccgcggtatctaaacgcgcgggcaggtcatcctgtaagtctccggcaaacagaatacggctttgttcgaaatcatcactgtgacgcagcaagacttcacttgccggggtaaatgcagacatggaatgctcctcaattgatactggcggcgattatagccatatgttggcgcggtatcgacgaatttgctatatttgcgcccctgacaacaggagcgattcgctatgacatcccgacgagactggcagttacagcaactgggcattacccagtggagcctgcgtcgccctggcgcgttgcagggggagattgccattgcgatcccggcacacgtccgtctggtgatggtggcaaacgatcttcccgccctgactgatcctttagtgagcgatgttctgcgcgcattaaccgtcagccccgaccaggtgctgcaactgacgccagaaaaaatcgcgatgctgccgcaaggcagtcactgcaacagttggcggttgggtactgacgaaccgctaagtctggaaggcgctcaggtggcaagtccggcgctcaccgatttacgggcaaacccaacggcacgcgccgcgttatggcaacaaatttgcacatatgaacacgatttcttccctcgaaacgactgatttaccggcggcttaccacattgaacaacgcgcccacgcctttccgtggagtgaaaaaacgtttgccagcaaccagggcgagcgttatctcaactttcagttaacgcaaaacggcaaaatggcggcgtttgcgattacgcaagtggtgctggatgaagctacattgttcaatattgcggtcgatcctgactatcagcgtcagggattgggaagggcgctgctggaacatctgatcgacgaactggaaaaacgcggcgtggcgacactatggctggaagtccgtgctagtaacgctgccgccattgccctgtacgaaagtttaggctttaacgaggcgacgattcgccgcaattactaccccaccacggacggtcgcgaagacgccatcatcatggcgttgccaatcagtatgtaatacaaggtggaataatgaagtgggactggattttctttgatgccgatgaaacgctgtttacctttgacagtttcaccggcctgcagcggatgtttcttgattacagcgtcacctttaccgctgaagattttcaggactatcaggccgttaacaagccactgtgggtggattatcaaaacggcgcgatcactagtttacagcttcagcacgggcggtttgagagctgggccgaacggctgaacgtcgagccaggtaaactcaacgaagcctttattaatgcgatggcggaaatctgcacgccgctgccgggcgcggtttctctgcttaacgccattcgtggcaacgccaaaatcggcatcatcaccaacggctttagtgccttgcaacaggtgcgtctggaacgcacgggcctgcgtgattacttcgatttgctggtgatttccgaagaagttggcgttgccaaaccgaataagaaaattttcgattatgcgctggaacaggcgggcaatcctgaccgtagtcgcgtgctgatggttggcgacactgccgagtccgatattctcggtggcatcaacgccgggcttgcgacctgctggctgaatgcacaccatcgcgagcaaccagaaggcatcgcgcccacctggaccgtttctagcttgcacgaactggagcagctcctgtgtaaacactgattgcctcccccccgttgatgggtaaaatagccgcaatttttcgttttcaacaagcgcggcgcgatgccgcttactcaagaagaaagaattatgacgttgtctccttatttgcaagaggtggcgaagcgccgcacttttgccattatttctcacccggacgccggtaagactaccatcaccgagaaggtgctgctgttcggacaggccattcagaccgccggtacagtaaaaggccgtggttccaaccagcacgctaagagcgactggatggagatggaaaagcagcgtgggatctccattactacgtctgtgatgcagtttccgtatcacgattgcctggttaacctgctcgacaccccggggcacgaagacttcagcgaagatacctatcgtaccctgacggcggtggactgctgcctgatggttatcgacgccgcaaaaggtgttgaagatcgtacccgtaagctgatggaagttacccgtctgcgcgacacgccgatcctcacctttatgaacaaacttgaccgtgatatccgcgacccgatggagctgctcgatgaagttgagaacgagctgaaaatcggctgtgcgccgatcacctggccgattggctgcggcaagctgtttaaaggcgtttaccacctttataaagacgaaacctatctctatcagagcggtaaaggccacaccattcaggaagtccgcattgttaaagggctgaataacccggatctcgatgctgcggttggtgaagatctggcacagcagctgcgtgacgaactggaactggtgaaaggcgcgtctaacgagttcgacaaagagctgttccttgcgggcgaaatcactccggtattcttcggtactgcgctgggtaacttcggcgtcgatcatatgttggatggcctggtggagtgggcacctgcgccgatgccgcgtcagactgatacccgtaccgtagaagcgagcgaagataaatttaccggcttcgtatttaaaattcaggccaacatggacccgaaacaccgcgaccgcgtggcgtttatgcgtgtggtgtccggtaaatatgaaaaaggcatgaaactgcgccaggtgcgcactgcgaaagatgtggtgatctccgacgcgctgacctttatggcgggtgaccgtagccacgttgaagaagcgtatccgggcgatatcctcggcctgcacaaccacggcaccattcagatcggcgacacctttacccagggtgagatgatgaagttcaccggtattccgaacttcgcaccagaactgttccgtcgtatccgcctgaaagatccgctgaagcaaaaacagctgctcaaagggctggtacagctttccgaagagggcgcggtgcaggtgttccgtccaatctccaacaacgatctgatcgttggtgcagttggtgtgctgcagtttgatgtggtggtagcgcgcctgaagagcgaatacaacgttgaagcagtgtatgagagtgtcaacgttgccactgcccgctgggtagaatgtgcagacgcgaagaaattcgaagagttcaagcgtaagaacgaaagccaactggcgcttgatggcggcgataacctcgcttacatcgctaccagcatggtcaacctgcgcctggcacaggaacgttatccggacgttcagttccaccagacccgcgagcattaattcttgcctccagggcgcggtagccgctgcgccctgtcaatttcccttccttattagccgcttacggaatgttcttaaaacattcacttttgcttatgttttcgctgatatcccgagcggtttcaaaattgtgatctatatttaacaaagtgatgacatttctgacggcgttaaataccgttcaatgcgtagatatcagtatctaaagccgtcgattgtcattctaccgatattaataactgattcagaggctgtaatggtcgttattcatcactcatcgcttttgtgatggcgaccattgacttctgtagagggtgaagtctctccctattcagcaatgcaacctcgtgttgccaggctcaaattacgagcaaacatacaggaataaatcgatgactatgacaagactgaagattagcaaaactctgctggctgtaatgttgacctctgccgtcgcgaccggctctgcctacgcggaaaacaacgcgcagactaccaatgaaagcgcagggcaaaaagtcgatagctctatgaataaagtcggtaatttcatggatgacagcgccatcaccgcgaaagtgaaggcggccctggtggatcatgacaacatcaagagcaccgatatctctgtaaaaaccgatcaaaaagtcgtgaccctgagcggtttcgttgaaagccaggcccaggccgaagaggcagtgaaagtggcgaaaggcgttgaaggggtgacctctgtcagcgacaaactgcacgttcgcgacgctaaagaaggcagcgtgaagggctacgcgggtgacaccgccaccaccagtgaaatcaaagccaaactgctggcggacgatatcgtcccttcccgtcatgtgaaagttgaaaccaccgacggcgtggttcagctctccggtaccgtcgattctcaggcacaaagtgaccgtgctgaaagtatcgccaaagcggtagatggtgtgaaaagcgttaaaaatgatctgaaaactaagtaattcgtcgtaattcgtcctcccgaactttgtcgggaggcgcgatgtgcaccacactaaaaatatcgcattgagtgattttcacgctcatatcaagcggtgacattaactatggtaaaggagacgcttatgtttcgttggggcatcatatttctggttatcgcgttaatcgccgccgcacttgggtttggtggtctggccggtaccgctgcaggcgcagctaaaattgtctttgtcgtcgggattattctgttcctggtgagtttgttcatgggccgaaaacgaccctaaatttcagaccattaagaaaattttatccaaagccagtccagcggactggcttttgcggttttagcgaataataaattgcgttactttgtcattctttcacaacaaaaacaggaaggcagaggtggggcagcgaatacctgtaacgcttggtaatattgcgccgttgagcctaaggccgttccagcctggacgaatagctctggtgtgcgaaggcggcggacagcgtggaattttcacggctggcgtgctggatgagtttatgcgcgcgcagtttaatcctttcgatctttatctcggcacatctgccggggcgcagaacctcagcgcgtttatctgcaatcagcccggttacgcgcgcaaagtcatcatgcgctataccacaaaacgcgaatttttcgatccattgcgctttgtccgtggaggaaatcttatcgatctcgactggctggtggaggccactgcaagccagatgccgttgcaaatggataccgccgcgcggttgtttgacagcggcaaaagcttttatatgtgcgcctgtcgtcaggatgactacgcgccgaattactttttaccaaccaaacaaaactggctggatgtgattcgcgcctccagtgcgatacctggcttttatcgtagcggagtgagcctggaaggcattaactacctggatggcgggatcagtgatgcgattccggttaaagaggcggcaaggcagggcgctaaaacgttggtcgtcattcgcactgtgccgagtcaaatgtactacacgccgcagtggttcaaacgcatggaacgctggctgggtgacagtagcctgcagccgctggtcaatctggtgcagcatcatgaaaccagctatcgtgacattcagcaatttattgagaaaccaccgggcaagctgcggatattcgaaatttatccgccgaagccattacatagtatcgcgcttggcagtcggattccggcgctgcgtgaagactataaacttgggcgtttatgcggtcgttatttcctcgccacggttggcaagctattaactgaaaaagcgccgcttacccgccatctggtgccagtggtgacgccggaaagcattgtcattccgcctgcgccagtcgccaacgatacgctggttgccgaagtgagcgacgctccgcaggcgaacgacccgacatttaacaatgaggatctggcttgatttgccgttttatcgacacccactgccattttgatttcccgccgtttagtggcgatgaagaggccagcctgcaacgcgcggcacaagcgggcgtaggcaagatcattgttccggcaacagaggcggaaaattttgcccgtgtgttggcattagcggaaaattatcaaccgctgtatgccgcattgggcttgcatcctggtatgttggaaaaacatagcgatgtgtctcttgagcagctacagcaggcgctggaaaggcgtccggcgaaggtggtggcggtgggggagatcggtctggatctctttggcgacgatccgcaatttgagaggcagcagtggttactcgacgaacaactgaaactggcgaaacgctacgatctgccggtgatcctgcatagtcggcgcacgcacgacaaactggcgatgcatcttaaacgccacgatttaccgcgcactggcgtggttcacggtttttccggcagcctgcaacaggccgaacggtttgtacagctgggctacaaaattggcgtaggcggtactatcacctatccacgcgccagtaaaacccgcgatgtcatcgcaaaattaccgctggcaagcttattgctggaaaccgacgcgccggatatgccgctcaacggttttcaggggcagcctaaccgcccggagcaggctgcccgtgtgttcgccgtgctttgcgagttgcgccgggaaccggcggatgagattgcgcaagcgttgcttaataacacgtatacgttgtttaacgtgccgtaagccggataaggcgttcacgccgcatccggcagttggcgcacaatgcctgatgcgacgcttaacgcgtcttatcatgcctacaggtttgtgccgaaccgtaggccggataaggcgttcacgccgcatccggcagttggcgcacaatgcctgatgcgacgcttgtcgcgtcttatcatgcctacaagtctgtgccgaaccgtaggccggataaggcgttcacgccgcatccggcagtcggcgcataatgcctgatgcgacgcttgtcgcgtcttatcatgcctacaggtttgtgccgaaccgtaggccggataaggcgttcgcgccgcatccggcagttggcgcacaatgcctgatgcgacgcttgacgcgtcttatcaggcctacaagtctgtgccgaaccgtaggccgtatccggcatgtcacaaatagagcgccggaaatatcaaccggctcaccccgcgcacctttaacgcatcagccaacggctcaacgtcttccggcgtggcgctcgcccagctttgcgcctcgccatacacgccgtgggcatgaaacgcgttcaggcgtaccggaacatcgccgagtcccttgataaacgccgccagttcttcgatgtgttgcaaataatccacctggccagggatcaccagcaaacgcagttccgccagcttgccgcgctctgccagcaaatagatgctgcgcttaatctgctgattatcgcgtccggtgagttgttgatgacattcgctcccccacgctttgagatcgagcattgcgccgtcgcacaccgggagcaatttttcccagccggtttcgctcaacatgccgttactgtccaccagacaggtgagatggcgcagttgcggatcgtttttgatagcagtaaacagcgccaccacaaacggcagctgggtcgtggcttcaccgccactcaccgttatcccttcgataaacagcactgctttgcggacatggctaagcacttcgtccacgctcatggattgcgccatgggcgtggcatgttgcggacacctcttcaggcaggtatcacactgctcgcaaaccacagcgttccacaccactttgccgtcaacaatctgcaacgcctgatgcggacactgtggcacgcactccccacagtcattgcaacgtcccatcgtccacggattgtgacagtttttgcagcgcagattgcagccctgcaaaaacagagccagacgactgcctggcccgtcaacgcaggagaaggggataatcttactgactaaagcgcatctgctgttcatggcttatcacgcgcggctggcgttccagaatacgagtgttgcgtgcggcttcttcgcccagccaggtggtgttggtgcgactaccttcggcgcgatatttttctaaatcgctcaaacgcaccatataaccggtaacgcgaaccagatcgttaccgctgacattggcggtaaattcacgcattccggctttaaaggcaccgaggcaaagctgtaccagtgcctgcgggttacgtttgatggtttcgtcgagcgtcagaatgtcgctgatgccggaataataataagcatgatgcggggcgacagtttgcagatgggtgatcggatctggctcatcgccatacggcaaacgcgcgcccggcgtggtgccgatatcggaactgatcccgctctgtgcgtgtaacatggcgcgtttttgccagccatatttcacgggggtattggcgacaaactccgccagttgcgcgctgatgcgataacctacttcatttgcggcggcttctttaccgtagcgcgcggcaatcccttctttttcacacagcaagttaaccgcttccgccagcccatacatgccaaacattggcacaaaacgttcagggttaatcagcccttctttcaccaggaagctattctcaaagaagtgactttgttgatagaggaattcacaccgcgcatcgatgatggcgatctgctgctggcagtagtgcggtagagtgcgcgtaaagaagtcatccaggctttcgctgcgctcggcaatggctttcaggttaaggcgtaccagcgtgctgccaccacccgccagcggcagactgttgtaacagctcacaatcccgtagcccccttttgtgaaaattttatcatgcaccggaccgttggcgatgtgcggtttgctacattcacagatgttcttcgccacttccagcagcaggtcatcaggggtgatttcaggatcgtagataaaggtcaggttcggactaacctgcttcaactctgcatctgcacgtaagatcgcgcgggtaatggggctatcagacgggccgatattggcgtgcataaaggcgtctggcagggttctgtcgaggtaacgccagaaacgttttattcgaacatcgatctcgtcttgtgttagaattctaacatacggttgcaacaacgcatccagttgccccaggtagaccggcatgcttgtgacgctcggtacgtggtggtaaagaatggtcagcagagagagtgcgtcatcaagatctttcgcgccttccagctccagccattcggaaccgttcgccagaaaacgggcgtaatcgggtaagacatagcgcggtttgtacggcgcatgaccttcaaacatatcgcagattacaccttcatccagcgcgcggcgggcttcggcaggaagctgtgggtaaggcagattgttttctgcttccagtgccagaaaatggcgcttctgctccgggctaagcactgggctggtgacaatttgctggcaacgttgttgcagtgcattttcatgagaagtgggcatcttcttttccttttatgccgaaggtgatgcgccattgtaagaagtttcgtgatgttcactttgatcctgatgcgtttgccaccactgacgcattcatttgaaagtgaattatttgaaccagatcgcattacagtgatgcaaacttgtaagtagatttccttaattgtgatgtgtatcgaagtgtgttgcggagtagatgttagaatactaacaaactcgcaaggtgaattttattggcgacaagccaggagaatgaaatgactgatctgaaagcaagcagcctgcgtgcactgaaattgatggacctgaccaccctgaatgacgacgacaccgacgagaaagtgatcgccctgtgtcatcaggccaaaactccggtcggcaataccgccgctatctgtatctatcctcgctttatcccgattgctcgcaaaactctgaaagagcagggcaccccggaaatccgtatcgctacggtaaccaacttcccacacggtaacgacgacatcgacatcgcgctggcagaaacccgtgcggcaatcgcctacggtgctgatgaagttgacgttgtgttcccgtaccgcgcgctgatggcgggtaacgagcaggttggttttgacctggtgaaagcctgtaaagaggcttgcgcggcagcgaatgtactgctgaaagtgatcatcgaaaccggcgaactgaaagacgaagcgctgatccgtaaagcgtctgaaatctccatcaaagcgggtgcggacttcatcaaaacctctaccggtaaagtggctgtgaacgcgacgccggaaagcgcgcgcatcatgatggaagtgatccgtgatatgggcgtagaaaaaaccgttggtttcaaaccggcgggcggcgtgcgtactgcggaagatgcgcagaaatatctcgccattgcagatgaactgttcggtgctgactgggcagatgcgcgtcactaccgctttggcgcttccagcctgctggcaagcctgctgaaagcgctgggtcacggcgacggtaagagcgccagcagctactaagtaagatgctttacgcctgatgcgctgcgcttatcaggcctacgagacgtatctacccgtaggccggataaggcgtagacgcatccggcaaaagccgcctcatactcttttcctcgggaggttaccttgtttctcgcacaagaaattattcgtaaaaaacgtgatggtcatgcgctgagcgatgaagaaattcgtttctttatcaacggtattcgcgacaacactatctccgaagggcagattgccgccctcgcgatgaccattttcttccacgatatgacaatgcctgagcgtgtcagcctgaccatggcgatgcgagatagtggaaccgttctcgactggaaaagcctgcatctgaatggcccgattgttgataaacactccaccggtggcgtcggcgatgtgactagcctgatgttggggccgatggtcgcagcctgcggcggctatattccgatgatctctggtcgcggcctcggtcatactggcggtacgctcgacaaactggaatccatccctggcttcgacattttcccggatgacaaccgtttccgcgaaattattaaagacgtcggcgtggcgattatcggtcagaccagtagtctggctccggctgataaacgtttctacgcgacccgtgatattaccgcaaccgtggactccatcccgctgatcaccgcctctattctggcgaagaaacttgcggaaggtctggacgcgctggtgatggacgtgaaagtgggtagcggcgcgtttatgccgacctacgaactctctgaagcccttgccgaagcgattgttggcgtggctaacggcgctggcgtgcgcaccaccgcgctgctcaccgacatgaatcaggtactggcctccagtgcaggtaacgcggttgaagttcgtgaagcggtgcagttcctgacgggtgaatatcgtaacccgcgtctgtttgatgtcacgatggcgctgtgcgtggagatgctgatctccggcaaactggcgaaagatgacgccgaagcgcgcgcgaaattgcaggcggtgctggacaacggtaaagcggcagaagtctttggtcgtatggtagcggcacaaaaaggcccgaccgacttcgttgagaactacgcgaagtatctgccgacagcgatgctgacgaaagcagtctatgctgataccgaaggttttgtcagtgaaatggatacccgcgcgctggggatggcagtggttgcaatgggcggcggacgccgtcaggcatctgacaccatcgattacagcgtcggctttactgatatggcgcgtctgggcgaccaggtagacggtcagcgtccgctggcggttatccacgcgaaagacgaaaacaactggcaggaagcggcgaaagcggtgaaagcggcaattaaacttgccgataaagcaccggaaagcacaccaactgtctatcgccgtatcagcgaataacggtatactgatctgatcatttaaatttgaagcactgagtacggagaacatatgaaacgtgcatttattatggtgctggacagtttcggcatcggcgctacagaagatgcagaacgctttggtgacgtcggggctgacaccctgggtcatatcgcagaagcttgtgccaaaggcgaagctgataacggtcgtaaaggcccgctcaatctgccaaatctgacccgtctggggctggcgaaagcacacgaaggttctaccggtttcattccggcgggaatggacggcaacgctgaagttatcggcgcgtacgcatgggcgcacgaaatgagttccggtaaagataccccgtctggtcactgggaaattgccggtgtcccggttctgtttgagtggggatatttctccgatcacgaaaacagcttcccgcaagagctgctggataaactggtcgaacgcgctaatctgccgggttacctcggtaactgccactcttccggtacggtcattctggatcaactgggcgaagagcacatgaaaaccggcaagccgattttctatacctccgctgactccgtgttccagattgcctgccatgaagaaactttcggtctggataaactctacgaactgtgcgaaatcgcccgtgaagagctgaccaacggcggctacaatatcggtcgtgttatcgctcgtccgtttatcggcgacaaagccggtaacttccagcgtaccggtaaccgtcacgacctggctgttgagccgccagcaccgaccgtgctgcagaaactggttgatgaaaaacacggccaggtggtttctgtcggtaaaattgcggacatctacgccaactgcggtatcaccaaaaaagtgaaagcgactggcctggacgcgctgtttgacgccaccatcaaagagatgaaagaagcgggtgataacaccatcgtcttcaccaacttcgttgacttcgactcttcctggggccaccgtcgcgacgtcgccggttatgccgcgggtctggaactgttcgaccgccgtctgccggagctgatgtctctgctgcgcgatgacgacatcctgatcctcaccgctgaccacggttgcgatccgacctggaccggtactgaccacacgcgtgaacacattccggtactggtatatggcccgaaagtaaaaccgggcagtctgggtcatcgtgaaaccttcgcggatatcggccagactctggcaaaatattttggtacttctgatatggaatatggcaaagccatgttctgatggatttgggcggagcgttgactccgcctttgttatgtcacaaaaaggataaaacaatggctaccccacacattaatgcagaaatgggcgatttcgctgacgtagttttgatgccaggcgacccgctgcgtgcgaagtatattgctgaaactttccttgaagatgcccgtgaagtgaacaacgttcgcggtatgctgggcttcaccggtacttacaaaggccgcaaaatttccgtaatgggtcacggtatgggtatcccgtcctgctccatctacaccaaagaactgatcaccgatttcggcgtgaagaaaattatccgcgtgggttcctgtggcgcagttctgccgcacgtaaaactgcgcgacgtcgttatcggtatgggtgcctgcaccgattccaaagttaaccgcatccgttttaaagaccatgactttgccgctatcgctgacttcgacatggtgcgtaacgcagtagatgcagctaaagcactgggtattgatgctcgcgtgggtaacctgttctccgctgacctgttctactctccggacggcgaaatgttcgacgtgatggaaaaatacggcattctcggcgtggaaatggaagcggctggtatctacggcgtcgctgcagaatttggcgcgaaagccctgaccatctgcaccgtatctgaccacatccgcactcacgagcagaccactgccgctgagcgtcagactaccttcaacgacatgatcaaaatcgcactggaatccgttctgctgggcgataaagagtaattgtgtttcgctgcaaggcgattgccttgtgaagccggagcgggagactgctccggctttttagtatctattcatttttctctccagcttgaatattttcgctatacttttcagtgaaatgtgttaataaatctattcaagtatctattcacgaatctattcattaatgagcgagctgactgatcttttactgcaagggccgcgttctgccccggaattgcgccagcgtctggcaatcagtcaggcgacgttcagtcgccttgttgccagagaagatcgggtgattcgctttggtaaagcacgggcaacgcgatatgcactgctgcgtccttatcgcggaattgagcgtattcccgtctggcgggtggacgataccggaaaggcgcataaattcgccgacatccggttgtgctggccgcagggaagttgtctggtaacaggcgcagatggcgacgaacagtggtttgatggtttgccctggtatttgaccgatctccgaccgcagggctttttagggcgcgcgtggggcaggaagttagccgcgcaactgaatctgactgatgatatacgtctctggcaggaagaagatgtgctctacgccctgaccgtatttaacggtgaatatactggcggttggttggtcggggaggggaattatcagcgatggattactgcacaacaccctgcggaaattcctctggatcaaaaactcacccattacgaacagctggcaagtgatgcactggcaggagaaattgtgggttcttctgcgggcggcgagcagccaaaatttacctactatgcacaaacgccgagtggcaataaacatgtgttggtgaaattcaccgtaccacagcaaaccgcggtcagccaacgttggggtgacctgctaattgctgaatctattgccgcgcaaatcctgcgtgacggtgggatccacgccatcgagagtacggtgcttgtaacaagtaacaggcaggtattcctcgaagcggaacgctttgactgcaaaggtaacgatggtcgcttgcctattgtgagcctggaggcggtgcagagtgagtttatctcttctccgggaagctggccgcaggcaatgcgccgtttgtgtgagcaacaacttgtcactcaccagagcgtggcgcaaacagaagtgatctgggcatttgggcgacttatcgccaacagcgatatgcacgcaggtaatttaagcttttatttatctgaaccgccatttgcgctgacgcccgtctacgacatgctgccgatggtctatgcaccaaacagcgctggaatgctgcgtgatgctgccattgaggtgaagtttgatcttaacgtcagtaaaagcgcttggttaacggcgatcccgctggcgcagcagttctggcaaacggtcgccagagatccgcgtatcagcgaggcgtttcgccacattgcgcaagaaatgccggaaaaaatccggcaaatcgaagagaaagttgcccgcatgggcgggtaattaccttacagcccccgccatccatgcgcttaactcccgtagctctttttcctgttccgggaagtcaaccaacagcgcttcgcactcctgttgcagcatatctgcgcggtacaggcagccttgcagtcgtccggcgagggcttccagcggcgcggggttgaggctgtcggtaaacacctgggcgcgggtgatatggcctttttcaacgtcgaaatgcagttccacgccgccccaggtaaagcgttcatccagcagatggctgaatgccggagcctgaccgaagttccattcccagctactctggcgggcaaaggtttcggcgaagtttggcaagtctggcgttttgttcggggagatgatttccgcttccacgcgctcgccataatgggcgaaaaaggcctcggttatggcctcgcaaacctgctcatgggtgatccccggcaacagctcggtgaggttggtcacgcgggaacgtacgctcgtaatgcctttcgccgccagtttctttttatccggattgagatagtttgccaggcggctgaggtcggcattgagtagcaaggtgccgtggtggaagccgcgatctttggtttcgcgataggcgctgccactgactttgcggtcgccttcgacggttttcaccaccagatcgttacgtccggacgcttcggcgctgacgccgagcgcgttcagcgcattgagcacaatgctcgtggagatagttttatcgtactccggcttgccagccataaaggtaaagcaggtattgccgagatcgtggaacaccgcgccgccaccgctactgcgccgcgccaggcggacgttatcttcttccatccgccgggtattacactctttccacgggttctgcgcgcgaccaattactaccgtgtcggcattgcgccagagaaacagaacgcgctgcgtggcgggcatttggcgaaaaatacactcttccaccgccaggttaaaccacgggtcgtaagagtcagagatgagcaggcgtaatgtggacataacgatttcctttcttgtagtaatgggtcactcttttttctcgctttcttcctcttccggcaccggtttgctggcggttaacaggaaggggctttgctgccagcgggtgcgtttaccctgtagcagcgtgcgggtcagcactacaccgattgccagactgagcagcaacatcaggcgtaaaatgttagtggtgttatccacctgttgggcttcggtggcgagcgtatgggtgtcgagtgtcaggcgcagatagccgagcggtccgtttttacccgcaattggctcgacaatctgctggttaaaatagccgcctgcttttttaccgtcgagcgccagccggtcgcgcacttcgacgctttcgccagaacgtgcgataagatcgccttgttcgtcatacacacccgcgtcgaggatacggctttcatccgttaactgatcgaggatcgcctgaatgcgtttttcatccggactgtcggtacgcatcagcggtgcaacgttcagcgtcacctgacgcgccagggtgcgggccagttcttccagctgtggattacgctgtcgctggtggttttgactaaaccaactcgctccctgcatcagcgccactaacaaggcaagacagaacaggacaatcactgcccgatgcagccggaatttcagttttgtgcgagccatcttccaccctttgaaaatttgagacttaatgttgccagaagcaatggatacaaggtagcctcatgcgttattttccctgcttcgaacgattttacaggagccttaatgcctaacattacctggtgcgacctgcctgaagatgtctctttatggccgggtctgcctcttagtttaagtggtgatgaagtgatgccactggattaccacgcaggtcgtagcggctggctgctgtatggtcgtgggctggataaacaacgtctgacccaataccagagcaaactgggtgcggcgatggtgattgttgccgcctggtgcgtggaagattatcaggtgattcgtctggcaggtagtctcaccgcacgggctacacgcctggcccacgaagcgcagctggatgtcgccccgctggggaaaatcccgcacctgcgcacgccgggtttgctggtgatggatatggactccaccgccatccagattgaatgtattgatgaaattgccaaactggccggaacgggcgagatggtggcggaagtaaccgaacgggcgatgcgcggcgaactcgattttaccgccagcctgcgcagccgtgtggcgacgctgaaaggcgctgacgccaatattctgcaacaggtgcgtgaaaatctgccgctgatgccaggcttaacgcaactggtgctcaagctggaaacgctgggctggaaagtggcgattgcctccggcggctttactttctttgctgaatacctgcgcgacaagctgcgcctgaccgccgtggtagccaatgaactggagatcatggacggtaaatttaccggcaatgtgatcggcgacatcgtagacgcgcagtacaaagcgaaaactctgactcgcctcgcgcaggagtatgaaatcccgctggcgcagaccgtggcgattggcgatggagccaatgacctgccgatgatcaaagcggcagggctggggattgcctaccatgccaagccaaaagtgaatgaaaaggcggaagtcaccatccgtcacgctgacctgatgggggtattctgcatcctcagtggcagcctgaatcagaagtaattgctcgcccgccatcctgcgggcggcacagcattaacgaggtacaccgtggcaaaagctccaaaacgcgcctttgtttgtaatgaatgcggggccgattatccgcgctggcaggggcagtgcagtgcctgtcatgcctggaacaccatcaccgaggtgcgtcttgctgcgagcccaatggtggcgcgtaacgagcgtctcagcggctatgccggtagcgccggggtggcaaaagtccagaaactctccgatatcagccttgaagagctgccgcgtttttccaccggatttaaagagttcgaccgcgtactaggcggcggcgtggtgccaggaagtgccattctgattggcggtaaccctggtgcggggaaatccacgctgctactgcaaacgctgtgcaaactggcccagcagatgaaaacgctgtatgtcaccggcgaagagagcctgcaacaggtggcaatgcgcgctcatcgccttggcctgccgactgacaatctcaatatgttgagcgaaaccagcatcgaacagatctgcctgattgccgaagaagagcaaccgaagctgatggtaattgacagcatccaggtgatgcatatggcggatgtacagagtagccctggtagcgtggcgcaggtgcgtgaaacggcggcttatttgacacgcttcgccaaaacgcgcggtgtggcgattgtcatggtggggcacgtaaccaaagatggtagcctggctggcccgaaagtgctggaacactgtatcgactgtagcgtgcttttggatggcgatgccgactcccgttttcgcaccttgcgcagccataaaaaccgcttcggcgcggtgaatgagctgggcgtcttcgcgatgaccgaacaggggctgcgtgaagtcagcaaccctagcgcaattttcttaagtcgcggcgatgaagtgacctccggtagcagtgtgatggtggtatgggaaggaacgcgtccactgctggtggagattcaggcgctggtcgatcacagcatgatggcgaacccacgccgcgtggcagtggggctggaacaaaaccgtctggcaatcctgctggctgtgttgcaccgtcacggtggtctgcaaatggccgatcaggatgtgtttgtgaacgtggtcggcggcgtgaaggtaaccgaaaccagtgccgacttagcgttactgctggcgatggtttccagcctgcgcgacagaccgctgccgcaggatctggtggtgtttggtgaagtcgggctggcaggggagatccgcccggtgcccagcggtcaggaacgaatctctgaagcggcgaaacacggttttcgccgggcgattgttccggcggctaacgtgccgaaaaaagcgccggaagggatgcagatttttggcgttaaaaaactctccgacgcgcttagcgtgttcgacgacttataatgagatatacggagggagatatgagcagttttgattacctgaaaactgccatcaagcaacagggctgcacgctacagcaggtagctgatgccagcggtatgaccaaagggtatttaagccagttactgaatgccaaaatcaaaagccccagcgcgcaaaagctggaggcgttgcaccgttttttggggcttgagtttccccggcagaagaaaacgatcggtgtcgtattcggtaagttctacccactgcataccggacatatctaccttatccagcgcgcctgtagccaggttgacgagctgcatatcattatgggttttgacgatacccgtgaccgcgcgttgttcgaagacagtgccatgagccagcagccgaccgtgccggatcgtctgcgttggttattgcaaacttttaaatatcagaaaaatattcgcattcatgctttcaacgaagagggcatggagccgtatccgcacggctgggatgtgtggagcaacggcatcaaaaagtttatggctgaaaaagggatccagccggatctgatctacaccagcgaagaagccgatgcgccacagtatatggaacatctggggatcgagacggtgctggtcgatccgaaacgtacctttatgagtatcagcggtgcgcagatccgcgaaaacccgttccgctactgggaatatattcctaccgaagtgaagccgttttttgtgcgtaccgtggcgatccttggcggcgagagcagcggtaaatccaccctggtaaacaaacttgccaatatcttcaacaccaccagtgcgtgggaatatggccgcgattatgtctttagtcacctcggcggtgatgagatcgcattgcagtattctgactacgataaaatcgcgctgggccacgctcaatacattgattttgcggtgaaatatgccaataaagtggcatttatcgataccgattttgtcaccactcaggcgttctgcaaaaagtacgaagggcgggaacatccgttcgtgcaggcgctgattgatgaataccgtttcgatctggtgatcctgctggagaacaacacgccgtgggtggcggatggtttacgcagcctcggcagtagcgtggatcgcaaagagttccagaacttgctggtggagatgctcgaagagaacaatatcgaatttgtgcgggttgaagaggaagattacgacagtcgtttcctgcgctgcgtggaactggtgcgggagatgatgggggagcagagataaccgtgatgaaactgctcaaaggcgaggtataaaatgagtttttttgatgagttgaaaacctctctggaagaggctgtcgagattaaacaaggtttgaaaaaacctgcacgggtgacccgccacgaaattgaggatgctaaggctgttgtagaccggaaacggtgttcacgccgcatccggcattcggtgctcaatgcctgatgcgacgcttaccgcgtcttatcaggcctacagttttacaacgtattgaaattgctggttttgtaggccggataaggcgttcgcgccgcatccggcattttacgcattacttcgcaatacgcttgtacttgatacgcttcggctccagcgcgtctgcgcccagcgtgcgtttcttgtactcttcgtactcggtaaagttaccttcgaagaactcaactttaccttcatcctggtaatccagaatgtgcgtggcgatacggtcgaggaaccaacggtcgtggctgataaccatcgcacagcccgggaactccagcagggcgttttccagcgcgcgcagggtttcgatatccaggtcgttggttggttcgtcgagcagcagcatgttgccgccaacctgcagcagcttcgccagatgcagacgaccgcgctcaccaccggagagttcaccaacgcgtttaccctgatcaacccctttaaagttaaagcggccaacgtaggcgcggcttggcatctcggtgttgccgatcttcatgatatccagcccgccggaaacttcttcccaaacggttttgctgttatccatactgtcacggaactgatcaacgctcgccagtttcaccgtttcacccaaagtgatggtgccgctgtccggctgttcctgaccagagatcatacggaacagggtgcttttacccgcaccgttcggaccgatgatcccgacgatcgctcctttcgggatgctgaagctcaggtcatcaatcagcagacgatcgccataggatttacgcaggttgctgacttccagcactttatcgcccagacgcggtccaggtggaataaacagttcgttggtttcgttacgtttctgatattcggtgctgttcagttcttcaaagcgcgccagacgtgctttacctttgctctgacggcctttagtaccttgacgtacccattccagctctttctcaatgctcttacgacgcgccgcttcttgactagcttcctgcgccaggcgctgatctttctgctccagccaggaggagtagttaccttcccacggaataccttcaccgcggtcaagttcgaggatccagcctgcaacgttatcgaggaagtaacggtcgtgggtaatcgccacaacggtgccttcgaagtcgtgcaggaagcgttccagccaggccacggattcggcatccaggtggttggtcggttcgtcgagcagcagcatgtctggtttttccagcagcaggcggcacaacgctacgcgacgacgttcaccaccggagaggttagcgattttcgcgtcccagtccggcagacgtagcgcatccgccgcacgctccagctgtacgttcagattatgaccgtcgtgagcctgaatgatctcttccagacggccttgttcagcggccagcttgtcaaaatcggcatccggatcggcgtacagcgcatacacttcatccaggcgtttcagggcgttaaccacttcactaaccgcttcttcaatggactcacgcacggtgtgttccgggttcagctgcggttcctgcggcagataaccaatcttgatgtctggctgcggacgcgcttcaccttcgatgtctttatcaatgcccgccataatgcgcagcagggtggacttacccgcgccattcagacccaggacaccaatttttgccccagggaagaaactcagagagatgtttttcaaaatatgacgtttcggcggaacaactttgccgacacgatgcatggtataaacgaattgagccacgttggacttcgcctctatgtttatcgtgataatgagttttcaaaggcgaagtgtagcctttttccccgcctaatcccagccggtcgatcaccctcgcagtaaaagtaaaaaagtgtccgtaacgtggcgtaaacggcaatgactggttagcataaatctattacgcggcatgacgctgcattgatgtatttacacttagaggatgcgcttgtggaaaaagccaaacaagttacctggcggctgttggctgccggtgtctgtctgctgacggtcagcagcgtggcgcgagccgacagtctggatgagcagcgtagtcgttacgcgcaaatcaagcaggcctgggataatcgacaaatggatgtggtcgaacaaatgatgcctggactgaaggattatccgctttatccctacctggaataccgccagatcaccgatgatctgatgaatcaaccggcggtgacggtcactaactttgttcgcgctaaccccacgcttcctcccgctcgcacgctgcaatctcgtttcgtcaatgaactggcgcggcgtgaagactggcgtggcttgttagcctttagcccggaaaagcccggaactaccgaagcgcaatgtaattactactatgcgaaatggaacaccgggcagagtgaagaagcctggcaaggggcgaaagagctgtggctaaccggcaagagccagcctaacgcctgtgacaagttatttagcgtctggcgtgcgagtggtaaacaagatccgctggcgtatttagagcgtatccgtctggcgatgaaagcgggtaacacaggcctggtaacagtgctggcagggcagatgcctgccgattaccagactatcgccagcgcaatcattagtctggcgaacaaccctaatacggtactgaccttcgcgcgtacaactggcgcgaccgattttacccgtcaaatggcggcggtggcgtttgccagtgtggcgcggcaggatgctgagaatgcacggctgatgatcccaagccttgcccaggcgcagcagcttaatgaagatcagattcaggagctgcgcgatatcgtcgcctggcgtttgatgggcaacgatgtcaccgacgagcaggcgaaatggcgcgatgacgccattatgcgcagccaatctactagccttattgaacgccgtgtacgaatggcgcttggcaccggcgatcgtcgcggcctgaatacctggctggcgcgtctgcctatggaagcgaaagagaaagatgaatggcgttactggcaggcggatttattgctggaacgcggacgtgaagctgaagcaaaagagattttgcatcaactcatgcaacagcgtggtttctacccgatggttgcagcacaacgcatcggcgaagagtatgagctgaagattgataaagcgccgcagaatgttgacagcgccctgactcaggggccggagatggcgcgcgtgcgcgagttgatgtactggaatctcgataataccgcgcgtagcgagtgggccaatctggtgaagagcaagagtaaaacagagcaggctcaactggcgcggtatgctttcaacaaccaatggtgggatcttagcgttcaggcaacgatcgccgggaagctgtgggatcatctggaagagcgattcccgctggcttacaacgatcttttcaaacgctacaccagcggtaaggagatcccgcaaagctatgcgatggcgattgctcgtcaggagagcgcctggaatccgaaagtgaaaagtccggtaggggccagcggcttgatgcagattatgcctggtacagcgacccatacggtgaagatgttctctattcccggttatagcagtcctgggcaattgctggatccggaaacgaatatcaacattggcaccagttacctgcaatatgtttatcagcagtttggcaataatcgtattttctccagtgcagcttataacgccggaccagggcgggtgcgaacctggcttggcaacagcgccgggcgtatcgacgcagtggcatttgtcgagagtattccattctccgagacgcgcggttatgtgaagaacgtgctggcttatgacgcttactaccgctatttcatgggggataaaccgacgttgatgagcgccacggaatggggacgtcgttactgatccgcacgtttatgatatgctatcgtactctttagcgagtacaaccgggggaggcattttgcttcccccgctaacaatggcgacatattatggcccaacaaagtccctatagtgcagcgatggcagaacagcgtcaccaggagtggttacgttttgtcgacctgcttaagaatgcctaccaaaacgatctccatttaccgttgttaaacctgatgctgacgccagatgagcgcgaagcgttggggactcgcgtgcgtattgtcgaagagctgttgcgcggcgaaatgagccagcgtgagttaaaaaatgaactcggcgcaggcatcgcgacgattacgcgtggatctaacagcctgaaagccgcgcccgtcgagctgcgccagtggctggaagaggtgttgctgaaaagcgattgattttgtaggcctgataagacgtggcgcatcaggcatcgtgcaccgaatgccggatgcggcgtgaacgccttatccgtcctacaaatacccgtaatttcaatatgtttggtaggcatgataagacgcggcagcgtcgcatcaggcgcttaatacacggcattatgaaacggactcagcgccaggatcaccgcctggtgatagacgctggcgcgagtgagtttcccggcggtaaacacgccgatcgccccttccttacgaccaatctcatcaataccggtataacggctcatcacgggaccaagcgcctcaccttcacgcactttttccagaatcaccgcaggcaacggcaaagtagcgctacgcgcctcgccgcgctggctggcgttttcaatcaccacccaactgaaagtgctgtcaccatcgatgccagcttcaatcgccacccaaaaatcagcctctggaagtaaacggcgggcattggctacccgatttcgtgcgccagcgcgcgtttcctcactgccaaagggctgttccggtacaccgctctcgacggcaacggatgcaatatggcaggatccttcgccgaagatctcgtgaaatgcctgcagaatggcctgaattttagcgggattggtggtcgcacagacaacttggtgcataatcagcattactcagaaaattaacgttacagcagtatacggaaaaaaagcatgttacaggtatacctagtccgccacggtgaaacgcagtggaacgccgagcgacgtattcagggccagtctgacagcccgctgaccgccaaaggtgagcaacaggcgatgcaggtggcaacccgtgccaaagagcttggcattacgcatatcatcagtagcgatttaggacgcacccggcgtacggcggaaatcatcgcccaggcctgcggctgtgacatcatctttgattctcgcctgcgtgaattaaacatgggtgtgctggaaaaaagacatatcgattctctgaccgaagaagaagagaactggcgtcggcagctggtcaatggcaccgttgacgggcgtattcctgaaggcgagagtatgcaggagctcagcgatcgcgtcaatgcggcactggaatcttgccgggacttaccgcagggaagccgaccgctgctggtgagtcatggtattgcactgggatgcctggtgagtacgattctcggattaccagcatgggcagagcgccgcttacgtctgcgtaactgttctattagccgcgtggattatcaggaaagcctgtggctggcgtctggctgggtcgttgaaaccgcaggggacatcagccatctggacgcccctgcattagatgagctgcagcgttaacgacggatcggaatcagcagttcacagcgtagattaattgggcgatctcccgctttggcatcttctgccgggtagtatcgctcaatatcctgacctttacggcgcgtcaggttgagcattggcatgcacgttccgtataccgtcaggataaactcctgcacgccggttcccagaccttcataggtaaacatcacatattcgccgccctgcagcatcaccggatgccccgtcagtacatagccatctgcctgatcctgggctaacgcggtggtatagaatacctcttgctcgtcgtctttatcctgactcggacgcgtttcattcaggccgtagagcaccggcggaatggtcggcgcgttgccgagaaaatcgtgccagaactgataacgcatttcatggcggaaatcagagatttgctccaggctacaggagtagctctgggtaacaccaatcagcggcgtatcttccagggtgacaaatttgtgctctggcatagtgaattcacccaggcgtagcggcgggcgaataccaaaggcgctccattcaggagaacggcggtaaagtgcaggagtctgggcaaactgcttcttgaatgcgcgggtaaatgtctgttgagagtcgaagcggtattgcagcgcgatgtccagaatcggacgcgcagtcaggcgtagtgcgaccgcgcttttgctcaaacgacgagcacgaatatacgcgccaatagcatggccagtgacatctttaaacattctctgtaagtgccacttggaataacctgctttcgccgctacattgtcgaggctcaggggctgatccagatgaccttccagccagattaaaaggtcgcgaataatgccggcctgatccataaaatatcctcatcctttcaacaacgagcacctgacatcaggtaattggataatagcattttttgctgttttagcattcagtgtttttttcttagtagagtatgttttagggcttgacggaaataaaagtattgagattttgttcttaatcaatatgttatttaccgtgacgaactaattgctcgtgtaatagataaaaatggtaacaatatgaaatacaagcatttgatcctgtctttaagcctgataatgctggggccattggctcatgcagaagagattggtagcgtcgacaccgtatttaaaatgatcggcccggatcacaaaattgttgtggaagcctttgatgatcccgatgtgaaaaatgtcacctgttatgtgagccgggcgaaaaccggtggtattaaagggggattgggtctggcggaagatacctccgatgcggccatttcttgtcagcaagtcgggccgattgaactgagcgatcgtattaaaaacggcaaagctcagggcgaggtagtattcaaaaaacgcacgtccctggtctttaagagcttacaggtcgtgcgcttttatgatgccaaacgcaacgcgctcgcttatctggcttactccgacaaagttgtagaaggtagcccgaaaaacgcgattagcgcggttcctgtcatgccgtggcggcaataacagaggcgatttatgcaacgggaaacggtctggttagtggaagatgagcaagggatagccgacacgctggtctacatgttgcagcaggaaggttttgccgtcgaggtctttgagcgaggcttgccggtgctggataaagctcgcaagcaggtacccgacgtcatgattctcgatgttggtctgccggatattagcggctttgaattgtgccgccagttactggcgctccatccggcgttacctgtactgttcctgacggcccgaagtgaagaggtcgatcgcctgcttgggctggaaattggtgctgacgactacgtggctaaaccgtttagtccccgcgaagtgtgcgccagggtgcgcaccttactgcgtcgggtgaagaagttcagcacgccgtctcccgtcatccgtattggacattttgaattgaatgaacccgcggcgcagatcagctggtttgacacgccattagcgctgactcggtatgagtttttattgttgaagacgttactcaagagtccgggccgcgtctggtcccgccagcaactgatggatagcgtatgggaagatgcgcaggacacctacgatcgcaccgtcgatacccacattaaaacgctgcgtgccaagctgcgcgccatcaaccccgatcttagtccgattaatactcatcgcggcatgggatatagcctgaggggcctgtaatgcgtatcggcatgcggttgttgctgggctattttttactggtggcggtggcagcctggttcgtactggccatttttgtcaaagaagttaaaccgggcgtgcgaagagcaacggaggggacgttgatcgacaccgcaacgttgctggcggagctggcgcgtcccgatttgctctctggggacccaacgcatgggcaactggcgcaggcgtttaatcagctacaacatcgcccgtttcgcgccaatatcggtggcattaacaaagtgcgcaatgaatatcatgtctatatgaccgatgcgcagggcaaagtattgttcgatagcgcaaataaagccgttggacaggattatagccgctggaatgacgtctggctaacgttgcgtggtcagtatggtgcgcgcagcacgttgcaaaatcctgccgatcccgaaagttctgtgatgtatgttgccgcaccgattatggacggcagccggcttattggcgttttgagcgtaggcaaaccgaacgcggcgatggctccggtcattaagcgtagcgagcggcgaattttatgggccagcgccattttgttggggattgcactggtgattggcgcaggcatggtttggtggatcaaccgctctattgcccggctcactcgctatgctgattccgtcactgacaataagcccgttcctctccccgatctcggtagtagcgagttgcgtaaactcgcgcaggcgctggaaagtatgcgcgtgaagctggaagggaaaaactatattgagcagtatgtttacgcattaactcatgagctaaaaagcccactggcggcgattcgtggagcggcggaaattttacgcgaaggtccgccgccggaagtggtggctcgttttactgacaacattctgacgcaaaatgcgcgtatgcaggcattggtagaaacgttactacgccaggcaagactggagaatcgtcaggaagtcgttctgactgctgttgatgtggcggcattattccgccgcgtcagcgaagcgcgcaccgtgcagttggcagaaaaaaaaatcactctgcatgttacgcccaccgaggttaacgttgctgctgaaccggcgttactggagcaggcgctgggaaatttactggataacgccatcgattttacccccgagagcggttgcatcacgctaagcgccgaagtggatcaggaacacgtcacgcttaaggtgctggataccggtagtggtattcctgactacgcgcttagtcgtatttttgaacgcttttactctttgcctcgtgcaaatgggcaaaaaagcagcggtctggggttggcgttcgtcagtgaggtcgcccgtttgtttaacggcgaagtcacgctgcgcaacgtgcaggaaggtggcgtgctggccagccttcgacttcaccgtcacttcacataacttcaaattcttcccacatagtcttcgtatcctgctgccattgcaaaggagaagactatgttgaaatcccccctgttctggaaaatgactagcctgtttggtgcagtattgctgttgttgattccgataatgctgattcggcaggtgattgtcgaacgtgctgattaccgtagcgatgtggaagatgcgattcgccaaagtaccagcgggccgcaaaaactcgttgggccgctcatcgctattcctgtgaccgagctttatacggtgcaggaagaggataaaaccgtggagcggaaacgaagttttatccatttttggttacctgagagtttgatggttgatggcaatcagaacgtggaagaacgcaagatagggatttataccggtcaggtctggcacagtgatttaacgttaaaagccgatttcgatgttagccgtcttagcgaactcaacgcgccaaatatcaccttaggcaagccatttattgtgattagcgtcggggatgcgcgtggtattggtgtggtgaaagcgcctgaagttaacggaacggcgctgaccattgaacccggcaccgggttagagcaaggcgggcagggcgtgcatatccctttacctgaaggggactggcggaagcagaacctgaagctgaatatggccctgaatttaagcggtaccggcgatctttctgtggtgcctggcgggcgtaatagcgaaatgaccttaaccagcaactggccgcatcccagttttttaggtgattttctaccagccaaacgggaagttagcgagagtggttttcaggcgcactggcaaagcagctggtttgctaataatctcggtgagcgttttgctagtggcaatgataccggctgggaaaacttcccggcgtttagcgtcgcagtaacgacgccagccgatcaataccaattaactgaccgggcgactaagtacgccattctgctgattgcactgacttttatggcgttctttgtttttgaaacgctcaccgcgcaacgtttacacccaatgcaatatttgctggtggggcttagtttggtgatgttttatttgctcttgctggcgctttctgaacataccggttttaccgtggcatggataatcgccagtctgattggggcgataatgaacggtatttatttgcaagcggtattgaaaggttggtgcaacagcatgttgtttaccctcgcgctgttgttgctggatggtgtgatgtggggactgctcaactctgccgatagcgcgctgttgttgggaaccagtgtgctggtggtggcgctggccggcatgatgtttgtgacccgtaatatcgactggtatgcgtttagtctgccgaaaatgaaagccagtaaagaagttacaacggacgatgagttacgtatctggaaataaggttgaaaaataaaaacggcgctaaaaagcgccgttttttttgacggtggtaaagccgattaatcttccagatcaccgcagaagcgataaccttcaccgtgaatggtggcgatgatttccggcgtatccggcgtagattcgaaatgtttacgaatacggcggatcgtcacgtctacagtacggtcgtgcggtttcagctcacggccggtcattttcttcagcagttcagcacgggactgaattttgcctgggttttcacagaagtgaagcatggcgcggaactcgctgcgcggcagcttgtactgctcgccatcagggccgatcaagctacggctgttgatgtccagttcccaaccattgaacttgtagctttcaacgctacgacgttcttcgctgacagtacccagattcatggtacgggacagtaggttgcgtgcacgaatcgtcagttcacgcgggttgaacggtttggtgatgtagtcatctgcaccgatttcgaggccgagaattttatcgacttcgttgtcacggccagtcaggaacatcaacgcaacattcgcctgctcgcgcagttcacgcgctaacagaagaccgttcttacccggcagattgatatccatgatcaccaggttgatgtcatattcagagaggatctgatgcatttccgcgccatctgtcgcttcgaaaacatcatagccttccgcttcgaaaatacttttcaacgtgttgcgtgttaccaactcgtcttcaacgataagaatgtgcggggtctgcatgtttgctacctaaattgccaactaaatcgaaacaggaagtacaaaagtccctgacctgcctgatgcatgctgcaaattaacatgatcggcgtaacatgactaaagtacgtaattgcgttcttgatgcactttccatcaacgtcaacaacatcattagcttggtcgtgggtactttccctcaggacccgacagtgagtaaaacggctgtcatcctaaccattttaacagcaacataacaggctaagaggggccggacacccaataaaactacgcttcgttgacatatatcaagttcaattgtagcacgttaacagtttgatgaaatcatcgtatctaaatgctagctttcgtcacattattttaataatccaactagttgcatcatacaactaataaacgtggtgaatccaattgtcgagatttattttttataaaattatcctaagtaaacagaaggatatgtagcattttttaacaactcaaccgttagtacagtcaggaaatagtttagccttttttaagctaagtaaagggctttttctgcgacttacgttaagaatttgtaaattcgcaccgcgtaataagttgacagtgatcacccggttcgcggttatttgatcaagaagagtggcaatatgcgtataacgattattctggtcgcacccgccagagcagaaaatattggggcagcggcgcgggcaatgaaaacgatggggtttagcgatctgcggattgtcgatagtcaggcacacctggagccagccacccgctgggtcgcacatggatctggtgatattattgataatattaaagttttcccgacattggctgaaagcttacacgatgtcgatttcactgtcgccaccactgcgcgcagtcgggcgaaatatcattactacgccacgccagttgaactggtgccgctgttagaggaaaaatctagttggatgagccatgccgcgctggtgtttggtcgcgaagattccgggttgactaacgaagagttagcgttggctgacgttcttactggtgtgccgatggtggcggattatcctagcctcaatctggggcaggcggtgatggtctattgctatcaattagcaacattaatacaacaaccggcgaaaagtgatgcaacggcagaccaacatcaactgcaagctttacgcgaacgagccatgacattgctgacgactctggcagtggcagatgacataaaactggtcgactggttacaacaacgcctggggcttttagagcaacgagacacggcaatgttgcaccgtttgctgcatgatattgaaaaaaatatcaccaaataaaaaacgccttagtaagtatttttc
